United States Patent Application Publication US 2026/0250680 A1, published August 27, 2026 (application 19/461,618).

The application's sequence listing, which the Patent Office published only in electronic form, follows.

SEQUENCE LISTING (251 sequences)

SEQ ID NO: 1 - DNA, 191001 bp, Homo sapiens
  source 1..191001: mol_type = genomic DNA
ctgacagaaagcagatcattggttgcctgaggaggaggagtataggagaggtggagggaaaatgtacaaagtggcacaataaaaacttttggaatcatagatatattcactatcttgattgagtgatgatttcatgagtgcacgcgtgtgtcaaaaatgatcaatttatgcaactttaaatatgtgcagtttattgtatatatcaattatacctcagtacggctattaaaaagaaaccctctggctgcacaatgcagaactgattctaggaaagagtggagggaggatgaccatttacagtgctccaggtggaagagaacggtgccttctggaagtgaactaggttggcaacaacagagatgaaataaatgggcagatgtgtgagatacttaggaaataaaacccgatggtcaccattttccaaaggtcagctcatcctggctttccagagcaaagagctagggaagactttattaataaatccctcttgaagttgcagaggaagcttatagcagaaacttactctcaacctgactaatctgagagaacacctctggttccatttgattactaaaaaactgcaaagaacaggaggagaaagaagaagaaagctggtacaaacagtgaacttatataatattaatcaataattgtctcttgttcttaaaagcaatgggaagaaaatgagatttgagctggaagatcagagttcaaaatccaaataaagtatatggccctaatatgcttatagtagttaacctttcctgataatgatataattgttgacagcaccatctttaaaaataaaaataacatagtaatccttcagatttgtagaatgctttcctgtttacaagtttgttctatacacattatgtcttttaaatgacacactagccttctgagggtaacttatattggcaacagttttcagatgtggaaactgtgaagacaatgttggtgatgtggaagcaacataaactttggagtctttcagacccaggtttgaatgtcagactgctttttattcagagtaacttcagagcattatttctcaccttaattttttttcaggcctctttgtgtctatgtgtcctcttcactcctgtccattgttcattcagtgatttttgcaccttccttcactgttagtgtgtagacacatagttctcctggctctgagacctatgttaattccattctaccatcctgccagcccactcaattcctattgagcaatgctagttgaaagttgtggtgggattaaatgttgcaatgagtattcaaatgaggttgaagtatctacgcattctacttacatatggtgaggtatattcaaggaaggctgtagccattaaaatctcaggaaataatttttcacctcctcaggtgaaagggtcttcaggcctttgtgttctggaaggttcatttatagccatttcccaaatgacaatgcgattgatgagtctagagtctagctcaaatagcaatggactggaagactagtttaggttttactaatgtggaacatagaacaaattatgtccttgtttcagcctgttcatctgtgaaatagagcctatcatatccagtcttccttgcctttaggtttgagttaccttctttggtcaaggtaagtaaatgcctatgatgtttggctgtgcacaagataaagctacaacaaagctacaacccatcttttctctgtagaagactgcaaaaagcaaaagagacccaggcaaaaatctcggaatgacttttggaacagagagcctccccagaatcagaagtcaaaggaatttaaaacatagggaggcccagggtctctactgacataaaggaaagatgttttccttataggtttacgtttacattttctctctctttccattcccacttgcatctccacctttacacagggcttatgggacctcctccacaaaagagcagttgcagtaacccacatcatcctctacgcctggctgtccatcaagaggcgaaaagcagccctatataggttctatccttggatagttccagttgtaaagtttaaaatatgcgaaggcaacttggaaaagcaagcggctgcatacaaagcaaacgtttacagagctctggacaaaattgagcgcctatgtgtacatggcaagtgtttttagtgtttgtgtgtttacctgcttgtctgggtgattttgcctttgagagtctggatgagaaatgcatggttaaaggcaattccagacaggaagaaaggcagagaagagggtagaaatgacctctgattcttggggctgagggttcctagagcaaatggcacaatgccacgaggcccgatctatccctatgacggaatctaaggtttcagcaagtatctgctggcttggtcatggcttgctcctcagtttgtaggagactctcccactctcccatctgcgcgctcttatcagtcctgaaaagaacccctggcagccaggagcaggtattcctatcgtccttttcctccctccctcgcctccaccctgttggttttttagattgggctttggaaccaaatttggtgagtgctggcctccaggaaatctggagccctggcgcctaaaccttggtttaggaaagcaggagctattcaggaagcaggggtcctccagggctagagctagcctctcctgccctcgcccacgctgcgccagcacttgtttctccaaagccactaggcaggcgttagcgcgcggtgaggggaggggagaaaaggaaaggggaggggagggaaaaggaggtgggaaggcaaggaggccggcccggtgggggcgggacccgactcgcaaactgttgcatttgctctccacctcccagcgccccctccgagatcccggggagccagcttgctgggagagcgggacggtccggagcaagcccagaggcagaggaggcgacagagggaaaaagggccgagctagccgctccagtgctgtacaggagccgaagggacgcaccacgccagccccagcccggctccagcgacagccaacgcctcttgcagcgcggcggcttcgaagccgccgcccggagctgccctttcctcttcggtgaagtttttaaaagctgctaaagactcggaggaagcaaggaaagtgcctggtaggactgacggctgcctttgtcctcctcctctccaccccgcctccccccaccctgccttccccccctcccccgtcttctctcccgcagctgcctcagtcggctactctcagccaacccccctcaccacccttctccccacccgcccccccgcccccgtcggcccagcgctgccagcccgagtttgcagagaggtaactccctttggctgcgagcgggcgagctagctgcacattgcaaagaaggctcttaggagccaggcgactggggagcggcttcagcactgcagccacgacccgcctggttaggctgcacgcggagagaaccctctgttttcccccactctctctccacctcctcctgccttccccaccccgagtgcggagccagagatcaaaagatgaaaaggcagtcaggtcttcagtagccaaaaaacaaaacaaacaaaaacaaaaaagccgaaataaaagaaaaagataataactcagttcttatttgcacctacttcagtggacactgaatttggaaggtggaggattttgtttttttcttttaagatctgggcatcttttgaatctacccttcaagtattaagagacagactgtgagcctagcagggcagatcttgtccaccgtgtgtcttcttctgcacgagactttgaggctgtcagagcgctttttgcgtggttgctcccgcaagtttccttctctggagcttcccgcaggtgggcagctagctgcagcgactaccgcatcatcacagcctgttgaactcttctgagcaagagaaggggaggcggggtaagggaagtaggtggaagattcagccaagctcaaggatggaagtgcagttagggctgggaagggtctaccctcggccgccgtccaagacctaccgaggagctttccagaatctgttccagagcgtgcgcgaagtgatccagaacccgggccccaggcacccagaggccgcgagcgcagcacctcccggcgccagtttgctgctgctgcagcagcagcagcagcagcagcagcagcagcagcagcagcagcagcagcagcagcagcagcagcagcaagagactagccccaggcagcagcagcagcagcagggtgaggatggttctccccaagcccatcgtagaggccccacaggctacctggtcctggatgaggaacagcaaccttcacagccgcagtcggccctggagtgccaccccgagagaggttgcgtcccagagcctggagccgccgtggccgccagcaaggggctgccgcagcagctgccagcacctccggacgaggatgactcagctgccccatccacgttgtccctgctgggccccactttccccggcttaagcagctgctccgctgaccttaaagacatcctgagcgaggccagcaccatgcaactccttcagcaacagcagcaggaagcagtatccgaaggcagcagcagcgggagagcgagggaggcctcgggggctcccacttcctccaaggacaattacttagggggcacttcgaccatttctgacaacgccaaggagttgtgtaaggcagtgtcggtgtccatgggcctgggtgtggaggcgttggagcatctgagtccaggggaacagcttcggggggattgcatgtacgccccacttttgggagttccacccgctgtgcgtcccactccttgtgccccattggccgaatgcaaaggttctctgctagacgacagcgcaggcaagagcactgaagatactgctgagtattcccctttcaagggaggttacaccaaagggctagaaggcgagagcctaggctgctctggcagcgctgcagcagggagctccgggacacttgaactgccgtctaccctgtctctctacaagtccggagcactggacgaggcagctgcgtaccagagtcgcgactactacaactttccactggctctggccggaccgccgccccctccgccgcctccccatccccacgctcgcatcaagctggagaacccgctggactacggcagcgcctgggcggctgcggcggcgcagtgccgctatggggacctggcgagcctgcatggcgcgggtgcagcgggacccggttctgggtcaccctcagccgccgcttcctcatcctggcacactctcttcacagccgaagaaggccagttgtatggaccgtgtggtggtggtgggggtggtggcggcggcggcggcggcggcggcggcggcggcggcggcggcggcggcggcgaggcgggagctgtagccccctacggctacactcggccccctcaggggctggcgggccaggaaagcgacttcaccgcacctgatgtgtggtaccctggcggcatggtgagcagagtgccctatcccagtcccacttgtgtcaaaagcgaaatgggcccctggatggatagctactccggaccttacggggacatgcggtaagtttttccttccagaaatgtcgcctttcggcccagggcagagtcactctgtgttctggggtatctagcggctcctacctgcgcgaacactcagattgcccctgggagagctcagcagggtaaacctagagctctcccgtggactcccggcctgccagaggtttaacctgagctctcctaatttctgctgcgtgccctgggtgctgattcctgccctcccagattcttcaactcccccaaccgccccaaattctcactacctcctggtactcgaggtcccaaacagaaatcctattgcacgggccaccttcagagataaagctcccaagccctccactcttcctttcctcctgtcctcaaagtctgagaacctcaacaggaatttgggcaatttctcctcttcaggtctgttaggatttcactttcagcctgcgcagattagagtcaaaaagaccggcccaatagcttctcagcgggtatcctccagagaggtaaagtgaaattctcggttagggaaagaaagtggtctctgggtgctgaggtctgctgtgtgaaagggtgaacttctttctcctgaagcaactggggacttgctccagggctggaggtcagtagagataatccaaaccgtcatgtttagagtaggcagaggggcaactttcttggtaaagacttcacaggatttgcactcacagtttctcaacgttggttgactatgttgaaagtagttgcttgggtcggttttctcttgtaaagtgtttattttctctgtggattataacagatccacagccccctacttcaggtttgcatcagatctataaagaggagaatattcttttaatgtacaatttaattaggcttgactctgacttacaaaactgttggaaaacatttttttgtaaagcatttcctgctatttcagtgtgctccaaaatctccactggggagggtggagtgaggttttttattatattcctttatttttaggacatgtttgcattttagaatatgtgcagttagctctaacaaattgagtaagaactcttaatgacctatgagccgtaatcttaccccaaagttttaattagcatatgagaaaagtggcaggcaattgcatcgtgcttattaaaaattattcctcaccgcagttgttgagcttcttggagaccatgctgaagattttctcccccagcaaattaagatattagtttatctgctgagggaggacagactgaattggggaattaactcctcaggtaggccaggtgctgatgtccctgtggacttttgtcttattctttgtttctatggctgttttcttttacctgtgacttctccgaaatttctttgttagccttaacatctttgtttggggacttaaatccagcaatttgccttctttcactgatgctttccttcttacaaggtagatagcacagtgttagtaaagaaagaaagaggagggtaggatttcatattatttcgtgggctgttgaagaaacagcttcttaccaggctttacattccattaggtttttaatgtttgacttacaagattttcagagggttcatttgatattgtcaaagtcttttccagttaatttagactcttcatttttgtaatgggtttatgctatgggacaaaaaaagtattcttcattttataagaacaaatttacttggtagggttaattttttttctagggctgtcactagacggtggagcccctcttctactgtaaacttttcttgggggaaaatgtctaaggtgcattttgacctgccatgatactaaacccagacactggaaccttccatcttctgcatgcctcccccacaacttacttacttaacagggaaaaaactgatggttccacatatttgctaaaaaatgtgtgccttcaaagacaaaaccaaaatttttagggaataactatagagagcaaaagttactcccatcaagtagacaacgagcttggtgattttatttcaggtcttaatgaaaaaagcttctttatgaggaaggttatcatatcttggtgcctccttgacagtccgcttaaattaatgacataaactaatgagaatttagcagttcctgcagaaagtacaagtttattttttttttctggtttgtgattgctgcactgaatatgaggagtctagttaaagggacaactggtgttcctgtcttgtgagttgacgaagactttccatttctaggatatagaaaatccttaagccggtttattgaaaattaatcaatttaatcagaatgcaatcaattccaatacaaaagttagtattttctttctttttattgaaaattaatttaatcagaatacaatcaattccaatccaaaagttgatattttcttactttctctttttttccctcattttgtagggatacaatttggtgaaaggcaagagatttcttaagccaaagcaagagtgtcttccctctctgtgttgcatgcattatgtgccatgtttgagctaaaaatctcaaaattgggcaggcttccaatgacctgttgggtccctccctttaccattcatgtgtgtgtttatgtacataattttgtggaggggtttttttaaaccttagtaacatctgcactcactctgtgttcttatacatttacagtgtttctgctgagaggagggaagatgcaaaggtggtctcttttacttaatttagcatgtggtttgaacagaaggaaaaataaaaagtgatggggcttgtgtgcaaccctgatgatattttatggagctgtctgtcttctctctgagatcaaacaggactacaactttgttaattgaccactggctcccttggcaaaagtagggcttcttatattccagcaagcagcacaataatatgacaaaaatttattcttgggagttgggttctaagagagtgcatgccagaattagagtttggggtttagagaaattatccagatgccaaaagaacattttaatttttctcttggtaatttgttctggtctccatagtaggtagtattttagtagtgctttgatattgacaagtcttgctccctttctctattagatttttcaaaataaggcattttattaattcctctttccttctcctctctcctctcagttatcaagcatttttatgactatcttacaagcaacagtttgtcttgtaaagcagaattttcctttgaaaccaagacagattatttctgcccataggcttcaggaaccaatattttggcaagaagcatcttttctttgtggtcagcaaataggtggtgagttctgtctggatcccaacaatcaacacctgaggaccaaatagccacactgggtggcaccccattcggaagtatacacaggaagtagccctcttgcttgttcacagctcaagtcagccaaagattaacactggtgagagatattttcaaagaagtttgcaggcttccaattgcagggtcattttggggtgctttcttgcctgtactaattttatctcatcaagcttccattctttgagctgtaaactttgaaataatatactggatttgctggtacgtttaattttctttgttaagtgttttcattcccatagtaatttttcatctagtgtacatatatgcatttaaaacaaaaattctttggtctccttatgcgtatatgcactgcggcttgtacacgtacaagctacttggtgggattatgtgaactggagttagaaatgtggacaattttattatgattatttttaatggtgatatcaagatcaccagtttcattcggaaccttgcataagcagggagcagaatgcggactgggtgtggcaaagcaagggcttattttatagccaaacctgaaatcacaactctgaaaaataaaaaaaaaaaaaaccaaacaaaaaaatcaagttttgtgagcttggtcagagaaggaaaaggaaatctctccctaccccccacctccaccattttctctttgtctgcagcttcctcaagtgctgcctgtccccgattttcttttattccactcctttcatgtttttgacattgaaatacagactcttctttccacttctcagggtatttttcttattacacctgtggcatgctcctaaagaatttcttttttaaaaaaaatctgtagagtagtagattagattaaccccagtatctctcccttaagactagatgacatgaggggattgcaaaatgaatagctgggtttttttttttttttttttttttaccttgaggttaaagcctggttcaacagttgctgagagagttaactagattgcttgaggacttggcaatttcataaagtattttgtcttatgctgtctctgtctctgtcttgatctctgtctctctctgtctactgtaatgttggctactttctctcagagcctgagagacagctctgagacacttcccaggtctgttcggttcagacctcagtagctggatcacaagcagtacccaatatgcatatgagggtgcgtgctgcaagtgtccggctgggctaatctgcttaagcttcataaaaattaatcatttgaaaacaaagaaagatattaaagaaattattctatctccgacttcccctatcagcattccatcaagttctgggatgttaaattcagagaaagttaaccttatcttaaacacaaagttgacttttaaacaaaattgcttataaagttctgtacagttaccagcattggttgccctttgtcgtacggaagagaattatgaaatctcatatttacatagcattcttccaaaaaaagagacggtgttttccagtttattcactgcattcgtgtaagtgtgagtaggccaggaggggtgcttagtgattacccttttgctaggtaacaaagtagaaagttagattttctatgatatttgtttaccacgtaggggaacctctctagagcaatactcccaagctttttcttcttgaaatttcccacctgacagataatactttagattgttgctcttaaggacttctctcagtagctgctacatagagatgattgtccgtgaattattgcttgcacactcatgggtgatgctactccctctctctcatggcaattcttgctgccaacctgcaggccacaccaggattgagggcagctcatctcgataaatttatagcattaaagtgctgggtcatttgagaatgttgtcaatttaggttacttagtacctaagttttattctttaaataacagctttattgagacgtaatttacaatccatacaattcactcatctaaagtgtacagtttcatgctttttagaatattcagagttgtgcaaccattattgcaatcaattttagaacattttaatcacccccaaaggaaaccctatgcacctttgtgttcatccccctatattccctcagtccttagcaaccaataatctacttctatctatggatgtgcttattctaacattttgtatgaatgaaatcatgtaatatgtggtcttttgtgactagcttctttcacataaaatatgttttcaaggtcatccatgttgaagcacatatcagtacttcactattttttatagcctaataatgttccactatatggatataccacattctatctatccatttatcaggtgatgagcattacggttgtttccaccttttggctattatgaataatactgctgtgaacattcacgtgcaagtttattgtggacatattcagtccacatattttggacattttcagttcttttggatacatacataggattgaaatctctgagtcatatgatacctctgtgtttatccttttgaagaactgtcaaactgttttctaaagtgtctgcactgttttacaatcccatcagcaacctatgggggtccatttcttccacatccttgccaacacttgttattctctgtctttttcattatagctatattagtgggtgtgaagtggtacctcattgtggcttttatttccatttccctaataacaaataatgttcagtatccatgttcttattggccatttgtatatcttcttttttgagaaatatctatttggatcctttgctcagtttttagttgggttttttattattgagttttaagatttttaaaaaatatattctggatacatgtcctttaatagattgtgatttgtagatattttttcacattctgtgagttgtcttttttactttccttttttttctttttacgttcttaatggtatctagattgaagcacaaaaatgtttttaagtttgatgaagtccaattcatctatttattttctgttttggcttatgattttggcgtcgtatctaagaagtctttgcctaatccaagatcacaaagatttacatatgtttccttctaagagttttatagttttcgctatttacatttaggtctttcatcagttttgatgtaatgtttatatatgactgaggtaggggtccaacttcattcttttgcatgtagatattcagttctcacaatattgttgttgaatctttcctcacttaactgtcttggcaccctttgtgtaaaatcagttgaccgtaaatgtgagggtttaattgtggactctcaactatattcagttgatctatatgtttattcctatgccggtaccacgttatcttgattattgtaggtttttagtgagttttgaaattaggaattttgaactcttcaactttggtcttctttttcaagattgctttggctcttgtgggtcccttgaattttcaaatgaattgggataagcttgtcaatttctacgaagaagtcagctaggattctcacaggaactatattaaatctgtaaaccaatttggggagcattgtcatctcaacaacgttaagttattttcatccataaatatgcgatgtcttcccatttatttaggtcttccttttgtcaacaatttttattgttttcagattataagttttgcagttctttttaaaatttattcctaagtgatttattttttgatactataaattgaactgtcttattgattttattttcagattattcgctgccaatgtatggaaatataattgttttgtatattgatcttgtatcctgcaaccttgctgaaaatacctgagttttgaatgcttctgggacttatggggaagagggcttctgctgctgcactgaaagttaaagcttacttcatttcatcctgtatgaaggctgcatggggacattcttctcagttttactcagctataaattcgaactggtaatcccatcccctttcgggatgaataggagagtgtttttaaatgttcatctctttagagaacagcaggaaagaagcctagtaaggtttgggtagtttataatcccttttttagaatttggatttgggaactattagcaaggcagtgagtaataataataatttctatatagaaaactaacatgtagaggtgacaaatgaaatcactagctatattaggcttatgtttaggttatcgtaagcagctaaaatcataattttatgtttttatatgttgtcctttggacaaagtaaattccagtactccttctgatgtgcatttctagatggggaaaggattcatttactctcatataatttaagcttctttttagggatgtactccatagccatgaagcaaagataaaattcatctatacacagactgaactttgtcttcattaacactctaggctaagggtcatagctaatcagctacaactgtaatgtcctgataattgtgaattaactgcagggcacccagcaaaaggtttagttataatctaatagctgtctgtagagattagcctaataaagggattttttaaaaaagaatctggccgggcatggtggctcaatcctgtaatcccagcactttgggaggccgaggtgggtggatcacctgagatcgggagtccaagaccagcctggccaacatggtgaaaccccatgtctactaaaaatacaaaaattatccaggcgttttggtgagcacccacaatcccagctacttgtgaggctgaggcaggaggatcacttaagcctaagaggcagaggttgcagtgagccgagatcatgccactgcactccaggctccgtcaaaaaaaaaaaaaaaaaagaatctatcaatcaaccacttttcattaagcacctgctatgtgcccagcatgtgctaggaagagataaggtgaaaggggacacaattcagacagaatcttcttgaggtaactgcttacgaggagcttatagccactaaaaacaaaaacaaacaaaaaccaaacaaccaaaaaccaaacagaaatgcagtatcatcatgccatgatgcctgtatgagatcctggattgtacggtatggatttcttaaaatgtagatattttaaaaaaaaagaggaatgaatcaatagaggctgaagtggtcagcaatgttacctgtggctgcttttaatccttcgtggaagtaagtaggagcatgtctaaactcaagcaatagattaaagatcttgatgtatattttaaataacagaagttagtaccactggaaagaatgaactggaggaatgggttgaaatctatttctgcttattcaatagtgcaccccagtcaagttagttgccaatttcttcttcagtttctttggctatatcattgcacttggtgggtacatgtttatgatgtctttatctgaacaagtcagcaataatatgagtaataaattaaaattgaaggtgattaatggctctgaatttgacataagagttgttttcctgccttctaagtttccattgatcctgatgaattgcacaaaccaaacaattcggggagtaagggggcacatgatgatcttataagagctttgctgtattagacaacgtaacattctgaaatggcctaccacctaacatgggctctgttctctgcaggttgagtaggttccttgcttgtggaactgtagtcccgctatttggccgctagggggactgcaagtgccccgtggcaggatttccctgggaatggtgagcctccattgatggtttcaacacacagccaaggccctatcgcaggataacttgaaccagaactgcctagcaccagacaataaataagctactatggtacttactgtttcatttgggatgttgtttctcgaagtggcaagcattttttagtaatattttgactttttaatacctttctttgcatatggagcagaaaacagtgacactggatatattcaagtagcactgtccagtttatagagaagtttcatattccattattgcatttcattcttgtttctaccttttacaagtaactagagtttggagtattataatagtattcatactattacagtactattattcccattataaaaattgtgcaaagagtggttaagttacatgtttacaatcaaacagcttcaaagtgactgatctggaatttcagtcccattctttcttctccagatcatgtgttccctgcttttatctcacagctctttttaccttatagatgggaaacatgagagtcagagaggcaaaagaaccacaagtggtatcaatactagaaatttatgaatttcttaaggcttctaggtttgttacccatccaccagactgatggatttggttgtgtgagagttctgggtgccaataaccttgccattctactttacagactgcatatattcaataaatgcttattaagcatctactatatgccaaattctgtactaggcaccaatgatgtagtggtgaacagaacagacaaaaatctcttcgtggagcagacagtttaatgagaggagacatgtagtgtacatctgagcatgaaaagtgccatgcagaataacttcacagagtgtagggtatagagattgatggtgagagggaatattttatatttgctggccagggaaaaccttactggaaaagtaaattttgagtagtgacctgaaggaaattaggaaatgagctgctatttggacatctggagttagaatattccaggcccagggaaccacaggcgcaaagggcctgaggcaggagcacacttgctgtgatggaggacaaagaggcccatatggctggtttaaataagtgaaggatggtagacaatgagatcagagttaatgaggttgcatggtaggtcttccttaggactttgaattttactcctaagcaggttgtattggacggttttgagcagggtaacatgacctgacttacattttaacaggctccctcctcttcataacatctgtcactctgatatattatacgtttgtttgtttacttactgtatgtggggggaagagactgtgggagcaaggggggaagcagggaaacaagtacactgcagtgatctgggtgagaggtgaccgtgtctcagactaaggtggtattggtggagaaggtaggaagtggctgaattctggatgagttttgatggtatagccaacagcatttactgacagattggatattcactgtgaaaaaaatagagatgaggatgattgccaagtttttggtctgagtaactggaaaaatgagattgccatttactgaaatggtgaagactgtatgtagagcaggtgcatgggcagggtagaaatcaagagtttgatttttgacttataaagtttgaattatctgatgaacatcctgatggcttcttctcagttagttctcatgcagtgccttcagctttgctgttcttcaagaaaattaaaaaggaacttagagatcgcctaggctgtaggtaccctctcccctctttccttttactttatagaggtctatagaagggtagggacttatccaaggtgaaacagtgagctggcgacagaactagggcacaaacccagttctcttgaattctgaatcagtagattttctttttttagtgtgattctgaggactcatttgggcaagagtgagttttttgttattgttttttgtttgtttctttgcccaaacctaaaaccaggtaattaaactaaatagtgaataaaactgggaaactatacaaattggttgctctccccaatcacactgaaatattattatttttactgaaccacataccaaaatatttttcctgtaaaaacacagtaagtgaacttttaaaggcaattgagcttttaacaaagctagaatctacagaggacctggacagaaatggccttaaatcctaggaaattagagttcatggaacctgggagaccatcttgtccagctagctcattttatgggtgaggtgcctgaggcaccaagatggaaagggacctggctaagctcatacagcaagctagtgcctgagcctagtcagagcctgttttaagggttagtcgtatgttgttttcttgaaaaaagttacattggaaaagtgaaaattctttggtccatactgagaacaaagaattatacataatcatatataataataatgatagcacttcctgaatgtttgctgtgtaaactttggcaccttgcatgaattgattcatttaattctcatgtcaactttaggaagcaggcctagagaggttaaggaacatgtccaagggtcacacagctaggaagtagcagaacttgtgtgcactcccaggaagtctggcttctaaccacaaggttctaactactgtgcaataccaggagcttctcagattacccttcacctttaccaacccaaatgactggtgacgtaggtgacttcattatgctctgcccctattatagtccactgatcctcaccaaataggtgggtggcctagaggttaaagtagaggcagagtgatggaaaggggtggttagaagaagttgatgactcatgatagggattggaaaacaggactacaggaattattgaaaagggcctagagatcccaaggaggttgatctccgactgctacaaacctgggcaattcaatgcctgcttaaataggagagttaagataagaaaaataaaattgccaatttttacagtcagacattgttttatttattttacatgtattaattcatttaatcctcaaaatactccatgaggtagctacaattatcatttctatgttgtagatgaagaaacaggcacagagcaattaaataacatgcacaagattagagaacaagtaagtggaagtgccaatattagaatctaggtagttcagctccacaacttatgttattttccactatatttatggaatgaggtaattttcttataacagaaagtttttaaaatgcaaaaacattgtgcctgaacttcaaacactgaacaactcatatccttaatatgcaccagtttcttttaagcactcttagaaggaaggatacttaacctaatgtcacatggtgagtaagtagcagaaccggaacttgaatttgagactccggactgccagacctctttccactctatcacttgggctcccttctaacattgacttgtctccctccattcctcctccgtattgttctgcccttcaccttttaattacctgtctccatcaacaagattggacagagaattgggagagtgagcagagtccatttccttccagagactggacaaaaggaacaaaatgttaggaaaaaatgtcagcatgtgggatttgtgggatttacactaaataagaagggacacttcccaggactgacaagatgctacctccgtccctctaggccccaatgtgttgtgcaggatcccataggaagtcatgaatgtggttgtcagataacctttttgttactgtggaaatggaagcaggctactgcaaaaatctgtctctccaggttttcttttaaagaaggtagtcttgctaaatgataactatttcagcatttatttgaaaatgggcagtgcaggagagaaagaatttttccaagcttgtcacattgggccacctctctgaagcattgtccaacttctaattagatgaggagactgcataaaccaagagttgagagtaaagatggaaacacttgatgtttggtgtttgggtgcagaaaggattccagaacatgttttgggtctctttactctgtccatccctccttccctttcatctttgtttaaaaaccacagttagcaaatgtgtagtctgtttgcaattgttcatctgaaaaatttgtttgatcagccttttgaataaaaaagaccaaattagactgagatatttcagtcaccaactatctaataatagaccaaaaattttaaccatgctcatactttcatatggtatgtagtttgctttagacattttctgggcttcagtgaggtgctagattgactcaaaatatggcaggtcagatgtgggattgagcagggtggactcttctctacccttcccaattcagagttccccatcaaagatgatctcatagtgtttgaaaaaccaagctgaaggctttgggaattagggtgctgaagggatatgctgtttcccaaagccttctcagtcattccttctccccccagttcagattcttaacacctctttccaggattagtgcagtgatcccacgtcctttctctctagctctctctgctactctctaattcctattgtatttgtgccaccagatctttccaaagtttagctccaatcttgtctgtatactgctttaaatgtctattagtctttaagctccttaagggtgggagtcctgtcttattttttccctattcttcgtgcttaatgcaaaggaagccttgctgtatagttgtgtaatgcatgattacaatttcagcttctccccattggcttatgggttaaagtccaaattatttaaatctggtgttcaagtccttttatgatctgcttatttttccagcctgaattcctggagttcccttacaaaactcttaaaacccagccaaaaggatctagtcactgtcactttaaaccatcctcactctcttgttttttgaacatgttatttttcttataatccctttgaccttgaaggctatcccaatttcaatactatccattcttctatgacagccccctacaaaatgaatattctcaacctcccaacccaaggagaagtgatctatatgacacaatatggttgaaagaatgttggcttcacttctttatctgtaaaccaggggctagaaatctctagtttataagattttgtggagaggggatcatatgtgattatggatgttaggcacaagtcaagagtgcataagaccttttggatttatcccttttttctttctccatcaatatggtacttagtcccttaaatcagaagtacttgtgttaatgtctgataacgtccttctaaatatacctctaaacatctgtctctctttagggcaaaggttggatatatctgcaaagattctctttggatataagatatccacagcacataacttaacagtggtgtacacagtaggtattccataagtatttctttatgaaatgattcagagtcaatagtagtaagtaactgccaaaaacaactgatggattgtaagttccattaacataaatacagtcagccctccatatccatggattccatatccacagatttaagcaactgcagatggaaaatatattttagagacacagtaaaaataacaattcgacagtaaaaaaatacaaataaaattatgtaaaacaactatttacataacattgtattagctattacaagtaatctagatataaatgaaatatatgggggatgtatataggttaaatacaaatatgacaccattttatatgttttagttaaggaacatgaatatttttggattttggtattcatgggagtgggggaatggaaccatgccccttcaaataccaagggactattatatgggacacagaataaaggagttgattgtcttgctctgttaaattctggtcagacacatttgcaatgtattgttcagccccagtattcatggagcatctccttttgtaaagcatggaggagctgtgagagagacatggagcagtgaacataactattgtttcaacgtacctgaaggattatcatggaataaagaagttagatgtttttctgtagtaccccaaagggcaaaagcaatgaggacagattacagttcagtaaacgaaagaggtttttttttttttttttttttttttttgagatgggagtcttcactcttgtcgcccaggctggagtgcaatggcgcaatcttggctcactgcaacctcgcctcccgggttcaagtgattctcctgccttagcctctggagtagctgggattacaggtgtataccaccactcctgggtaattttatttattatttatttatttctttatttattttagtagagacggagatttcatcatgttggccaagctggtctcaaactcctgactgcaggtgatccgcctgcctcggcctcccaaattgttgagattacaggcgtgaatcaatgtgcccagcctgaaagatattttcttagaatagcttctttcacccttcatcagaagttgtcaacatggaccatatgagttttgtttggtctatatggtgtatatgtgtgtgtgtgtgtgtgtgtgtgtgtgtgtgtgtgtgtatgtgtgtgtgtttattgaattacttgctaacattttacttcaaaattcagatttccaccatagggaatgaagatctggcaatacaggactttcattcctacatggtaatgaccagctgtaggtgaaaagcagctgatcctctggatgggccatgcactttgcagtttgcccaggcagcactgatccgctttattcatttaagttacctgcttgactcttctagtcattcgagtatgtcatccccatcagatcagagacctaagcaaatcttgggtcccttgcttactccaagggctttcactcctcgtataggaggagctaaagaaatgtacaagcagcaccacaataggatcagacctggctttcaattctagcacggccacataacatagttggatgacctcaggacagtaacataacccctctgagcctctagatcttcattatctgtagagcactcttcttatagagttattataagaatgaaataaaacaactaggataaagggcatggcacttagtaggtgctgaaatattagttcccttcttctaattcaccacaccatatctgtctatctattggctgaatcacataaatagtaaattcacattcactgaagacattcaagaagagtctggaccctttgggaaccatgtatagggcaaaggtttgaactcatagtagatgatttttacagtcactttttaacaatttaaaagcctatagatgactccaaaatgcccatttggatgatatgaggcatactttgtgtagttaaggattttaaatacataacagagaggctgaagggccttcgggaaagaagctggggtaagagtcaaagtgtagtatgttgaccgatgttcaggaataggctttggcatctgacagattttgttttaaatactggctctgggtcttactagcttccagttctgggctgcttcacctctcttgagtttcagtttcttcatttctaaaatgaagatactaatgcttcctttgttgggtttttgtgaatataagtgagataataaatgtaaatatctagcccagggcctggtgcatagtacaagcttcataaattgtacctattattattagtagtagtagtagtccagacaaacagagcttgggaaaacgctagactctggctgacatacatgggcttttccccaggccactgctgcctggcttccccttccacaaagctttgagtctccaaaatgctttggctggaatgtaagcgtgaggtcattgcagataacaggggagcatgatttgcttcggtaatgcaagttattaagttacttccctcagcccagctgaaatctcttattggttgatgtgtgcttcaaagtgtgagacagagctagtctgaggagagagggagagtgagaagattcctcttcttggccagaggtcatggtcttccacaaggaacagaatgactcaatgcaaattatgggacctctttgagtttggggcccctacatttaaactagtaactccgttgcacatattggcacccttcccccaacaaaattactgggcaggaattttcttgaatccttccgtggcctggaatgatctcccttctcatccttgtgatccacacagctggcaaatggcaggcagcagaacaaaaacaagcctcttagcatatagggagagaaagagtcacagcagtactgaatttgcttgggaacctaatgttaacaaaggaccttcctctcaacaccccaaacagattaaaacatttttttaacagcaagttgtgtctcggagcagctctttgcttgggtatatttaaagatctgctgagtcatttaagagcaggctggcatatcctaagaggcaaggactataccccagtctatgggggagtaagttgagaggtgaaatctgtttggctttctcccatggaaacaaacaaggtgatccacttccatctcccacgactctggagagcatctactaagccttcttattctatcaactttgaactcctcagtgtataatagagtaagggtgagagggaaggagcagtcgtaccagtgtcattattggtatgttcaggagttcaatttcttcctgattcagtcttggcgggatgtatttgtttgggaatttatccattttttctagatttttctagtttgtgtgcatagaggtgttcataataccttctgatagttatttttatttctgtggtgtcagtggtaataacccctgctgtctgaaattgtaatggccctgctattggtagctgagagtagcatggaagtgtcaggttgatgggttcatttaattcttttcttttcagtttcagtcacatgcattgttaccatggcatatgacagttgctagaaagtgaaataattttttttctactttattctccactgcacttctaaatttattagtggagaaattagcagttaccaactgttcattataggtacacattggggtttccttagagccaattttccccctggttttcatcttgtaaatctgtaatcctaaaaattagcaaaacctagagcttctctttggtcctggcctgtttgaaccctgttccacagaccccaatcttctttcttgtttgaggcaactatccttctctttgcccaccgccattttccttcatctacttttcccttctctagcacctcagactgtcttcccacagtggcacagcctcccactccactttcactgtgccatctccttgccatcaaaaccatcctcacagacccttctgaaaccacttctaggaagggaaatcacaatggatccatgaaggatgctttctggatgactttaaaagattggtattaagatattttatcagtggtagcaacactgacttattcaggcagccatgccccggatctataagaaatcaggtaagctaaaagttgcttgagctggcaggagacctagttctcttttttcctttccctcttgcattttgtttatcgatggttttcaaaggacttagaggctggctttgttatagttagttggtaagagaaatggtggaggaccggaaaatgggagtggaacgaatgagcatgtttgagactaagttattacaattcctaggatgtataaattgcttgaaatctaccaagtactttcagacacattatcttttttactcttcaaaatcaacttggaggtaggcacaacagggatcaaatccttagttcacagatgagtaaactgagactggaggaaattaaaggagattccaaggtaactcagacaataagcaacagaaccaggatttggtgaattttttggggggtgggaggtacagagtctcactcaggctggagtgcagtggcaaggtctcgtctcactgcaacctctgcctcctgagttcaagtgattctcgtgcctcaacctcctgagtagctgggattacagacatgtgctacaatgcctggctaatttttgtatttttagtagagatgaggttttgtcatgttgcccaggccggtcctgaattcttggtctcaagtgatccacctccattggccttccaaagtgcagggattataagcatgagccactgctcccagccccagaccattaatttttgacagtaagtccaacttttttcaagttcacagctcagatttgctattgaatgaatgagtatatatgtcatttgggaacattctttccaacttttggttgaagatttgttttatcacttgtgaaaattttttttcattcttagcaatgtcagtttagttaaatgagcatttcatttgcgaattcactaattaattattttattcatcaatacatttcctgagtaccaactttctatcaaaccctgtgctggattctgaggctacaaagagaaataagataccatctcaggcctctaaaatctcacagactggggactgacatctcagtagtaaacatatgaacagcaacttgtgaaacgccattagcaaaatctcaagttatattcttcagtgactatggccatcctaaaaatggggtgtcttttatttggggtaaatgaagatgaagccttatgagaaattgcattttaatctaatcttgtcttgctaagaacagaagtggaatgtttcagcctctgtgtgtgtatttgtgtgtgtgaaggttgagtgtgtgatgatggatggggctgcgagattgttaagtaggatctatggggggccttaaatggtcctggtgagtcccaactttctggttatgtatttgagtagagtatgggggtgacaaagattgttgtttaagagttgattttagattttttccaagtaaatggtcagctgacttggagcatcatcattccacttgctttgaaaacctgccacttaaggctccttccagtcataggttaactctttctggtcaagtattactctttttgagcatttacctgtcagtgacaggtacaatgttagatgttgtctctctgttttcttgtttaatctttactttgatcctaggtagctcttattagttccactttataggtaagaaactgaatttcagagacttgaatgacttgttcaagatcacatagtatagtaacttggtagtttgggacttgaattttgattgttcagttttttgtttgtttgtttcctggcctccctgctgttttcactattccacaccacttcagctttatttttcatagaggccattaaatgtaccctccatcagccaaagcctcttgcctcccttcaacgtaactcttctctagcgtcctcttaataatcttctgaaaaggttttacagcctttctgggtactgggacccagagtcttaatccaggctcttaagtgccttatttaactgtaatatggaaaatcaaagtcacagctaattcaggaaaaatgagtttgggatgtgaatttcctaggcaacttgtcatctcttttttacttccttagcttcataaacttacccacaatgttccctgaggactaagagtaatggagggtgatgaggaaaggctttcctcccttcctttccgagagtcctttagccaaatgccacacctcctcctgtttccctagtctccgtgcagagatggaagtgggagatagacatgggttcctttcagccctgagttcatgccagggttttctttccctctagctggactgaggtaggaggagaggttgaagtccaccaataagaccatgagtgaagaagactaaagtacttgaaagagcagcagacctacgcttaaaatactagggtttgtgtccagactttgtgggttactatctgtataattttgggcaagtcaacagttctgagtcagagttcccttatcagcagattggaagataaattctaattatatagatgaaacattaagtctagaagtaatttgtaaattcagaaagggcttatagatttaaagtgtagccgttttgattaccacaaactaaatcctatacttcagggataaaatcttctcctgttttttctaaaagcctgtgcatgtgtggtgtaaggggtgggttttcccttgtaccagcaacttagcaattgtagtaacggggctgagggcagtggcatgcttcttcattgagcaagtgtgaaaagagggttatgcattcaggggtcagcagatggcaggcagagtagcccctccaaatctccctcccataccacaaagccctcttatttattcaaacttaacattagaagctcatttcaagtaggcacgtctgtgtctgggcgtctattttccttctttgtatatagcaggcatttgtcaacttggtgaaaagcattactcttctttccatttctgaggactaattgtgcttcttcgctagacacgagttcaaaacagtgggttgaaagagggcaagtttatgccaaagaatcagaaatagtcataatttagagagaattctagaggtcagttccctttcgtatggactgggcaactgaaacccagacagggaagggaattagaccaagttcacaagcacaaacactttactggcacattcagattggaaatcgagggcttctgctcccaggtcagaactaaatgccctttctagctagggtgttctttgatctcagtgattttgactctttctactgcactctggggacagtgggttctgcggtaccaactccaattaaagtgggaatatgtaccagcccctccccttggtttttatttttcagaggcctggcagtcagagggattctgatctctatatgcaatattttcacactactgtacttattgaaatcacatttgaatcttggcaattaacaaggcagtaattggcatcaggagggtatgttagtttgcttatctgcgccgtccctcctcttcccaacccactgtgtattgcagaatgttttatcagctctgatttgccaagttgctctcttctccagtaggtgctgcgagcagagagggattcctcggaggtcatctgttccatcttcttgcctatgcaaatgcctgcctgaagctgctggaggctggctttgtaccggactttgtacagggaaccagggaaacgaatgcagagtgctcctgacattgcctgtcactttttcccatgatactctggcttcacaggtgggaggttcttcaattgaaaacttagaactcagtttctagggtagtgagtgttgtaaggtttggactgtgacctaatattacgcagccatgacattatctattaggcatctagactagcttgcttgaatatcttagcatgttgactaatttggggcagaatatagtgtgggtgggggattttgtgtgtgggggggggttgggggttgagcaattcattattattaaaatgcaaaaagcacttaattcgctatgataagattgcctttttcatgcatactggcctacctgcaagacccctagagacagtaagcagcatacatggtgtcttccagttttcagcctttgtgcaaggaacaactgtgggtttctgcacatgtgttgtggtttgatgtttgtatgtgattgtgtaccagggtatgtgtgtctgttattgtgagttcatttctgagcagttgtgacacacagagatccagaaacagtgtcttaccctgtgtgctttgctagtgggaacgtgtcttttcttttgtgctcgtatctctgtgtaatcgagtgtcttgctaagtcaatgtgcctctgtctctttttaccagttctgtctttgtgtctctgtgccttcatgtattttttcccctgagtttgcacgtctctgtctatgtggatatctctcactccaggccactgtatcactgtgtctgtattacagctgtttatttctgtcggtgtgtggatttctatgtctgttttcatcttaatttgtgtgtctaagcaagactgttttggggtgactatttcagtttatgtcatagccattctttgtgtgactgcttctaggtatgtctttttctatgcccctattgtccccatctccatgtgtctctgtgtgtatatgttctaatgtatctgcctacttatcttagtttgtatttctctgggtgtatatccctctcttgcagttctgggcctttgcagtttttggcttatgtttttgtatatatccactagaattggcttcttatcttttttgtgcatgttttagtttgtatgagtgagcatatccaactctgtctttgagaagcagaactgtctgtgtttgcagtcagttgtgttggctgtccctgtgtttgtccctgtgtgtgcatttcattgtatgtgtacgcatccatgtatctttctgcttctctgtgaccagatatttctgtgtagctgtctatgtatattggcttctgtctgtgtctgtgttgttggctctacgtctgtgcatatgcacccaccgggttcataaaaagctcacctgctctccaaggaatctaccagattattttgtgaaataactcacgtttcgtttttttacttgccagctgctatggtacttaaaagtgtgttggtacgtaggtgtgcataatttattcatgtaggatgtcaaaagagtcagttaaaaattatgcacagtgtgtctttattaacaggacacttgtgtgtagagaatccttgagaaatgagtggttagatgataaatcttttcatattaatttcatgatgtcagtgaagtaaatttgcaagatatgggctgcataagaactatgttctttttaaaactcagcatattgatggtggagaaagcatttatttgtactgcaaagtcttatttctgataagacatcacaaataagaattattgtgatgagacttatcacaaataagaattattgtgataattcttatttgtgataagaattactgggttagaaggtgttacttttctggttttgtttgggtttttgttttgaagtgttactacagatggtgtcttagggacaaagagctctgaggttgacttagaacacatggagtacagataaaaaggagaatgaaaagtaacagagagatgggcatattccttgtttgaatggagtcatccaggggctcaggatggagtgcacaggaaatggagaggtgaaggtcatagagagaagtttagcaggaccagatctttccttgtcctgggctgctgtgaccatataaggaaggcagtaaggggaggggtagggatgaggaagagaccagctctcctctttctttctgatggaaggttaccacctctatttaaaacttctgttcttttggtttctctttctttctttgattatattattttctggacttgttctgccaaagcaagaaggaaattccacatgtggctcactcatttattatacttgtttctttgcacgatattaaagacagcttgttaagtgtcactgcaaacatcatacacactgatccactgatatgggcagggggttctttatgccagttctgctctcttcccagtgtatctgtggtgcttaatgggcgcaaccatgatttttctgatgtcagtctgtgatgtcagttgtccagtgtgtatgcaggctgcttaagagtacatacagttccttcacaattatggtagtccctgagaaggaagtggtcattaataaaagactaggttcagtagaaacatgtaagttgtctaggtgttggaaattaatacagtactgtgctaagggaacatatatctagaagttaactgaattatgctcaataaaaagagtacaaatgtttcataaatattttgacctaatcctcctgtaagattaggagagggatatttccgatattcaaataatttttttaattggcaaacaccttagacatactatttacataaaattgacatgacaaaattaagtcattgtgtctgttttatgataaaacaggctcttttgatttagttagaattattgaatgtaaaataatgaaaattaaaaaaaaaacaaggaggaggaatctatcctattttataattcagaccgttgaattgagtttttcttttgttgtattgatttaaatgcagagaagtctatgatgctggattccagtcagaagataaacatttgtatgtgggctctacattgcagccaaccttgataatttcaaacctcgattttctcatctgtataatggtaataataaagcctgtctcagtagctaccaaatgattgcatatgacaaacttctcacttatttaagggaaaaaataagaaaaagaaggacaatagggtggatttttcatatagtaaaatttattcagttagggtaatattctgagattgtcttctgaagcaaaccctgcaaaccctggccattctgttttgtttaggaaagaattcatcagttctgattctgccttttctggggagggaggctgagtattggattgaagaggagtcactacttttctgagatgatatatccgtggtaaaaattattaatgctttgcacatgcaacatagagtgttcaattttgttagtcaacaaatatttaagtggcagctgttatgacctcaggggtgtagtgacttccttattgtcctttaattattaaaaaagaaatctatatcagaatatcaggtaaactcttattacatcaaatattataataaagatactttttatattctctaaacaaagtagagatctcagatgttggttcatttatcaatataatattagatttgaaaattccagtatacaaaaggaaaaggacagcttcttaaagtttatagtgattttctatgaactatcaattccgtttttttctgttttactggtatgatggaaactaaatttcgagttgtaagtagtagataattagactgcagggtaagccttgagattacttcttttcaggtaggaaactctactgtgtatttggctagttcaacctatcatgggtagtcaaaaatagttacatatacaagtcagcattttttaaattgttcagttgtgcttaagattggtcctttccaggaacaatccagctttatcaaaaaattattgcgtacatgtaaagtgttctgacattttaatgctcacaatagccgaatgacgtgggtaagaatcttcgtcttcattttatagatgaagaaatgaagacacagagacataaattaactgggccagggtcctaccactagaatgtgatagatgataatttgagctcagcacatagttatttccctataatatttgttttatgattgtatagatgtctgctgaccaaccttaatctctgctccctaagattaaccattctacaaagcagaaactggaggtcattcaaatgaaagctctacacttttagagggccattaacaatgctcaagttaaagaaaagcaatcaaagacaactaaaatactggtaccttcaaacagtacttatgaattatttaaccttagataatttggctttgagttagaaagatagagtaagatggaggaaccaattcttccctgggttgatatttatttatcttgctcttttgaagtctaggccaatcatcctatttattctgaatggcccgttaacgtttatccatttagggacagcaggtttggcacaaatggattggttttctgaggtcttatgtagagggctgcactgactgacttctgaaagtcccccctaacccttcaaatctcagggtcatctggtctcaagccttcaattatgaatacatttctattgcctttttgagtaacagcacaacactgcaagctgacccactgggtggatggaatggggctcttgccctaccaccctttggcaaacaatttgagggtggcattgtcactacctcattgtatatagggtctcttgaggcccagaatggcaaaataattttcccagtgtcacacagcgagttattgtcagagtaaatatcaattttgaatttgtagaccacgtggttttacctcatcatttctgtttgttatgaaagttttacaaataattagaagtagaaataatgattaaaataaagcataactactaaaaaatagtttattgcagcaccacctaaattcatctcaccactctaccagtagcatacatttcacaattgggttaacattgctctggatcttatagctgttgaagaagacaaaattctttccattctccagcttatattttccccatttgtaaaacataatggaagtgtacggaaaataggagttgataatttttaaggcccttgccagcacattagtacataggattcttgcaagtggtggtttacttcacttcaactatagaaggcctatgcgacaccacccatagagggtagtttgaaagaaaatgctagtgactacgtgtgtttccttcctgacatattttatagaaggtgatgagttccagcattttttcagacttggatctggctttcattccccttctcctcccaccctctaaaacaacagaggcagcaaccatttacacactttccagaagtaagtaagtaagactgtattccagaaacaccctatatcaaaatggaaatatactcaagtgccccaatgacccattgggctagtttgaacgtgtgcagtctctgtgctccccgttttagcttaagcctactccctaacctgtcatatgtcacccagccatggagcctagggcaatgactgccatcatatctgactttatggcctctcagctttcaatgactagctttgtagcagaagtttagcctctcatccccataactttggaagtagtgttgagataaagaaacgttgaattgaaggttgtgttttctagatttctttcaattgctccttaggctttagaagataaattctcctaaaagagaggtgctacaattaatccaagcaaagggaaagatgtcagtaaaactgccccttttcatagaggtgtggcaactgctgggaaggaagaaattagcctgaggccatgtgattactaataaactcaaagcggcatttttttacttctcaatatgaggttgaaactataagcttaaattgctgactttctggcagcaccaaacagtaaggaaaccacaaagataaacccaaataatagagccaattttctttttttccgggggggatgacttctaactagtgatatgaggaaggataagaaaatgtttctttgtaggacatatgatctttgctaagtgcactgaatgtatgtagaggagacaagtctgctgagggtatgagaattgggccaagatttaacacattttcaaagctccatgaagaagcctactgagcagtgggagtggagcaggttggggatagtgaagtatttgtaattcatttttaaaaaggagagggagagagaaaaggaaaaactgggccacccatcctttgaaaagaaaccttgaaagaggtccaaatatccttagaaatccttgacttcttaaaagtgatgtttgttttttccccctgacaattatagaggtcagagagtttttcttttctattacaaaacattgagagtgtgtagaaataattgtaggtagcttagccttggctgtagtcagaacttttgtactgtgactttaggatctgtatggaatcgtatgatatgcggatacaccaaaaactctatgggttatcaaaatgggatagcattaaaagaaatagtgcttttgtttagaagaagaaatgaaatgcttgtgtccagatgcttaaaggaaggcagtgcagactttcagaaactagactttaagagctgtactcagatactgagaagggctgatggctgaaggaggaacaatttaaaagaataaccgtctctcctctccctgtatattggacataaaagaatatcccattcttttcagaaatgtaatacaacagtttagcttgctagtaacttcacatgctatttcctttacctcttatatttgaggtgtctatttggagtgggctgtgtttctagctattctgtttatctggtttgtttttgttggtgtaggaaactggtataaattttatttgggtaaatatcacctcaattttcaactaaagctttatttaagtttcacatgaaaaagacaaatgaggcaaaggaagagaaaaatgcattgtcagaatcagaattatgagaaaaaaagtcaaacaaacatatttgaaatgtccagaaaacctgtgagtttttatgtatactatacaggaaagatattctgtcatctggttgccaaactatggagggtgggagacttcgaatttttgtcaaaaagtattctttcattagaaagatacatgggtgtgcttccatgtcagcaacatgactgcagaccaggaagtcctcacggagagctggaatatgggtattttggactctctggttagatgcagcttttacttcacatcctcagtggtactactgtaaattttcattttcctgtggaataccctatttggttccattgtatatagttgacaactagaattcgttcgctgttgcttgagcccaactataacttcttggcactatacctatcttctgatgtgcctgtggaagagctaccataatgaatgtgtacatggacaaaaaaaaagagagagagagagagaattaaatcatgagtttgtgccttgggagctacagtttaaacatttgctgtttttctcacttaatgaaaaatttatttgaaaataacagcacagaaaggaagaaagacaggctggcaagcatcctcctcctaatacacttatccacgtttggataccttggtctcagcctcagaggtcatatttttagtaaaatggccaccagaaataaaggattttattttccagactttggtgtttggagctggtgtgctgagagctagcagagaaagccctactcaggtagatgtaccagagcaggatggttgctggtggatatggtggaataccttttatgtggttatctcctccttgtaactcttggctgcataacccttattttcttttctatttttattctctctcttggaaaaaaaattggtggtaaattttcatgtgagccatattgtctttttaaatagttttattaatataaaatgtacgtaccataaagcatacccatttaaactgtaaatgtcaatgggtttctctctctctctctctttttttttttttttttggatgctcagagttgtgcaacaattatcaaaatcaattttggaacaatttcattgccccaaaaggaaaccctctgcccattagcagttactccccatttcccccaccccctgacccttcaaccctaggcaagcacaaatgtactttctgtctctatagatttagccattctggacatttcatgtaaacagaatcatgcaatatgtcaccctttgtatctggcttctttcacttagcatgatgtttccaaggttcatctgcattgtagcatctgccaatacttcattccttatttatggctgaataatattccattgtattaatgtatcatatttgttttttccaatcatcagttgatggacatttgggttgttttcatcctttttttagctattttaaataatgctgctatgaacgttcgtgtacaagtttttgtatgaacatctgtttttatttctccttggtatacacctaggagtggaattgctgggtaatatggtagcttaacatttaatcttttgaggaactgccagatttttccaaagcagcagaatcattttacattttgaccagaagtatatgagagttttagtttctccacatcctcaacaacactcattattgtcattgtccttttcagcttttttgataatagtaatctcaatgggtgtgaattgggaccccatcatgcttttgatttgcatttccttgaagagtaaggatattgatcatcttttcatgtgcttattggccgtttgtatattttttgatcctttgctcatttccaaattgggttatttgtctttgcattattgagttgtaagatcttacaatatattttggatgtttgtcattttagggatgatacttcacagttatatgatgttttctagcaagcatttgcgttgttctactggtgttacatatcttagctgcattagccactttgctgggtatgaatgccagcagaatctaagtgaccttggcttcactactgagaatgcaacccaagaacagaaatttgtcagaaatttagcactgaagccccccacttcccaaacttatctgggacaaggagaatctacatttaaagctctatactttgtgttgtgttttttttactttagcttggttggatttaggatcttttctttttgttttgccttatgcatacctaagcagaggcaagggaggaaagggatatgaacctggtagaaaagtaagtaagctttattcagattggcatatccatcttaatatggttcaattggctgaagaagtatctcaactaaaactctggaatactttgaagtaccagcaatatgtaccaaatgtactttttatttatgtttggtctctatgtacttgtgtgtgaaacaatgagcacaaataataccctccttgtttttaagcaatttatattggtgatttaaaaataaaataaactcaagtgggaaatcatgaaaccccatgtaaaaacaataagagcatgttttaaaatcccacagactttagtttcaaatagtggttttgctatttcttagctgtgtgtcactgtgcaagttactttgtttctctgagtctttattggtgatatatgtaaaaacccaccttctcaaattattgtgaggacaaaatgaagtaattaacataaagttcctggtgtataataagtgttcatattttgtatttgagcacagggcaactgggtttttgaaactgcacattactgttgcagtcaaatctggcatgaaattagtgcatagacagaatgggctgggaaaatgaaaggactttgaacatttatattctgctttatttaggcataagtgcttaataattattgatagtttcttctggttatctgacattttgaagatactattacctagcagaaatttcttgtaataataatctcttacacttatatactgttttgtgcctttagaagtacttaatgctctttatttcactatctgttcataaacattctctgaagcaagcatacagtcagtatgaattccatttttcagatgagacagctgaggctgaaagacatagagttacttgtctcaattcacaaagtaaagtgccagagtttgaaccagagcccaggtcttctctctcaacgtagctctttttctccttcattatatcaggcatagtagcaacgtattcttttactagctttttatcttgaatatccttttagcgacttgcctttggtgttagtgtgcctataacattgtcgttgaatatcttaatacatttagtggtcttggcaagcagttttgtcttcagaaggacactgaaatctgtggaaaggactgcagaagattgggtgggcagacacctatcactttcggggctggtagactttctattgaagcaatttgcaaggctactttgtattgtctaaaagcactacttcagaaaagggttgtgatgtcaaaataggcactttgagtgaagaaagggctgtaagcatgggtggaaaatgtggtagatgattgtcttgagttattttctttaatgtcaaacaggcagtccttggaatgctacttcaaaaagtgttgtataatgttgaagatacagttacagatttccaacacgaaactcataaatatgcaattccctgtcctcctaggcacatgaaggaaaatttatgagcttcaggtttctatgcagctattaaagcatatttaatctgctttgagctcaagctcactctcgttggctctcttcgtttcttcctcttacatgagcaaactgcctttctttttgtttaaaaatagtaagtaggtttgttttcctccaggtgtcatgaatgcaaacattgtaatttctcatctgttcagcctttttgcacaacaaaatggcagcacccaggaggttgaaagggttaaattgttccttctctgagtagtaccataagttgttagtctgctactctttctcccagttggcacatgaccctaacatccaatcgctagtggtgtggccattttttggtcttattttggcctttcctcagccaccactcatcagttctcatgcgtatttgtcagatcctgctccccaactccacagttcttagttcatcttaagcatatggctgtctgtcttttctctaaagatcctcaagggaaaaaaaaaaaagcatctccagggggaatttactgcctcatagccctgacagagatttctgaccaaaccctaacgaaaaaatttcttccctccatttgtcttttattgtttttacaggggagatatgtaacataataacaattatattgcacataataattacttctacaaataataatctgttgtcaaaaatatacacagctttggatttccttattatggcccttcattaagttgtggtttaagaatagctatgattattacttttgtgataattataatccataatatggaaacttataaaattacctttaaagtgttactattattctggccacaggatggaaagttgttcgctagttactcatttataacctgaatgtactttttactgaatctaaaggtatcatctttgcttggcaattcccatgacttgtctttctgactcttcagatctcagcttaaaagctctcccttcaaagaagccttccctgaccactctggttttttcttctttttttacctctactccttttcccattacttgctgtcatagcattctgtttgtttcctttgaagtgcctattccaatttgtcattatgaatgagtttttttgttctgttgcttattatccattttccccactagattgtcaactctgtgagggcagagaccatgatactctgttcactcctatatacattcccagcactatcagactttttggcacatagaagatactcagtaaatatttgttgaatgaataagtcataaagaagagtttatattttaactcttagttgaataatctaagccaagaattatcaacctgggttggacgtgagaatcattaatgaatctttaaaacaatgacaaggcaatctatttattaattatctccaggtctaaactttagcacgtatatacattttaaaagcccataagtgattcttacgtatagccagtgctatctgtctcttctcctgtcctttcccctcctctccttactcctctctcatagttttaggattagcatggccccacaacaaatctttaattcacatggcaatttctaggatttatcatggaaaatgagccaaattgccttcaagaagtttttacgtacctcttatatagaatgtgatgttttatatgtacctcttatagaatgtgagcttttaagaggcatatcttattgcaagaaatttcaatgttgaaaaaaatattgaatatttataaagtcaaaaatgcaaacttttatatgattttcaaacctatgaagttatatcatgttcaggccttctttccagcatgtggctctcagccctggtactgtccttaaccataaacctcatctttgccctctatagggagaggtttatggttataattactcattttaaatagtgtatattagtaatgtacactatttgtatatttgttgactgcctcctatatgccaaccactatgctagaaattttgtaatattcttcacgatattcaagatattaacatatccgcattttataaatgaggaaactgctctcaaagaggttagtttacacagccagtaagccgctaagcctagattggatggaaggtatgtgagaaaaaagcagcatccataaggttttcattctcctaccctgtacgacagaggtaatagaaattattagttaaagaaataatagaattttacaagactctaggaagggagaatgtgaaggatacagttctcagttactggaatgagtgccagagtaccagtacatggcttgccttggggtttggactacctatcttaactcctttgctcctcccaatcttgatctcatttgtttgaaagatcatctgcccaacataaaaatgcatttctaattctgtaatttaagtcagtggcaagatcagattcagttaaagtttactttcctgacagctttttagtatcatatctattttgcaaaactctagtgataaatgtatgcacatttacacatacagcatctcttctgattctgactaagatattactgggttgtgtagaagtgatgggctctttagaagaaaggtttgatatactactaatctaaggactgaattttctcatctttgtctttgccccttttgactgatgaccagagcaggagcacataacattcttttgtgctaacagtatctctgcatcacattgatcaggagaattggcatctccagagccctgggatggtaacttctctgttgattttcaggaaagattaggtgatattttctccatgggaagaggatgtttgatgtgtgttggctttagcaaaaggaagcttgtggagtcaactgtaagtagacagaattgcctttgacttaatctgtttcagtcgttgttcatactcaggtcctccagaggacctttaagcatttttattgactttgtggtctattacacgaaactaaagatactgattctcagtcatgagtctgctccaaaattgcctagggaatcaaaaataattgtaccagttcctattcctggacattatgattcatttggtctggtatgaaggccaggaatctgtatttttaaaattcactcaagcaattttcatatatagctataattgaaaatctgtggctgaacttctccactcccgtatccatcgcaatacttccccaaggtggcatttaagatgggcctagagggttatataagatttcaatattaaaacatggattaaaagtgaagacttttcacatggagataatttggaagaaaaacttgcaaaaatgtgagagcattgagaacttttctttcccaaggaaagaagtggcagcttcatttttggtcattgcaaacagcagtgccatacatgaaaggaaagtggtggtgctcatcaactttgaataactttgtacagaacccttgagactcctctctgcttataaagaaaaagtgtcaactgtaaagttgatttatttatgaaccataggctactatgaaatctctgttcccagctagaggcctgggagagtaagataactacttgtttattccacggagccacttattagctttttctatagcacatacctcaaatgaagcatttcaataaaagaaccacattctattcacatgcttcattttattctgatttatgtaaaaattcccaaactcctcaagcagtgtttctttgtaaggcaataatcttcagttctgttgcaaaggtcaggagtgatagaatgaaaatggtactagatacaacagctctttggtatttgcatggccattacattgccatggggctgcaagacttgtgagtgcttgatattttgcttgttgatgaatgagtctgtgtttgtgctaatggagtgatttgagaggtagttctccactgtcagtcaagaggttggttttgaaagctgattgccaatggtcattctgctaaccactctggttctcctttagatagagacttattcagattcaagtcttcatgtactttgtggcataaacattgtacacaccagatgtattcaacaaccataaaaaaaaacaattaggactcaagtagtatgtcagagtgtagtcactgatgatatataattctccactaccaagaagatggaagcacactgttgagtagctacatcctacatatgttggccagaatttaggaatacacatgtgatctatacattttgaggtattgtctgacccctagaaaatcctggtgaagtttttctggtgtcagtttggtcttaatgtttaggaaatgcccacagactactcctgctttctgcttattcacatagtaaacgcaaagcacaggactagtttgtcatctggatcaaggagaaatgagttagcagatataaaataaatcagaaaggaggtagttctcaaatatttactccatgaatagttgctggatgttcattaactctatagcatttgttactacttattggggatcctggaaagaaaatatattgtctatatccactgttcactgaggccctctccctacccagaaactccctgtctccatcactcactctccacattcattgacccaggggaacagttcatggatgagtgaacttgagctctatcttaaaggatggagttcgatttcaaggcaagaggtataagagaaagttcagagacaacactggctatggtctttgtgaagaaaagtgaattgaataggctcctgtggagatcttaagtaagtacttctggagataaggttgaggaaaagtaggtttgaatcttcatccagaggtagcccctaaatgtgttgagtttattgaaagagtacttgacttggattcagacagatctgcatttgactcctgttttgccatttataagaatttgagtaattattgtttctaaataagagtttattgagccaagcactcagtaaatgtttgaatgggaaaattaactgccctgtttttctattgtcagatggtcctcttcgttggataacttggtaactgttgataaccttttctcaggaatcagaaggtagaaaggttgggaaaatataagaaacaaaaaggcatattcctatttttattttcatattgtcttccaactctcccaggcttctttgtttgcaaggctgacttttataatactttttgggtagagcaggtccttctttggtttggggttaaaccgtgagtaaccttattttctaggtctcagccaactttgaagggcatgaactcacagtagcctcactaggatcacttcagcagtgagaatttatctttcttgtataaaagtgtaagagttgatggcggccaggcgcagtggctcacgactgtaatcccagcactttaggaggttgagatgggtggatcacctgaggtcaggagttcaagaccagcctgaccaacatggtgaaaccccatgtctactaaaaatacaaaaattagttgggtgtggtggcacatgcctgtaatcccagctactcaggaggctgagacagaagaattgcttgaacctggaaagcagaggttggagattgcagtgagccgagattgcaccactgcactccagcctgggtgacagagtgagactgtcaaaaaaaaaaaaaaaaaagagttgatagcaaaataactatctgtagcataaacctcagtattctttatcattcagtatcaacattattactgaaaacaataagcaatatggactgagtttctgtggggtggaaatgtgaagtggatcatagcatgatataacttgtcatttggcttcctttataaacattatcaactacctcagctctatcaatcacttggcagtccgtagtgaacattataactcaaatgactagtcaggtctgttcattgcccatgtaaaggcatatacctgaagtgagaagtctgaggtaacttagcaataagcttgcagtacagtgtttagtgaagccgaggaattcaaggatttgagtcatgccagattgctccataaccatagcctatctttgtcacaagtaagaaggtttaaaaatcaccataccattattggtcacaacgtttggagatagggaagagtttgtggatggatcatggcagtgcatggacagtgattagcccataacacaaccagtgaacactgttgtacccaaagcacataaatcaccacatatactattaatatatttatggatgacaacagacactataattttatgtcagtgctttctgctgtgaaaaacaaagaaagttaagggtaccttttttatatttgcatcatatctccagaccttttcctttatctccttcttgcaagttcttctttctttcagctgactatctgctgttcctgctatggctcccagtggcttttcaagagggtacttgttttttaagagaagacccttgaaggacagagagagcctgaatcattcaaaataatgaattactcaggatgaaatttcaataatttgcaagtgtgtggagatagatattttgaggaagcataattttctatgtacccctcaaatcgtggctggagatgacagcctcttccacctccatataagaccatttcatttccttctacttttttctccctccttcccccaaacacacaaacatacacatatcctgtgcttcagtcacacagaacttcttactatttcatttcaattctctatggctttgcatgttctgctccttctgcctagaatgctcctttccttttttcacctggaaacatcccaattcaaatgtcacctcccttatttataccaactttgtctgtaactcctttatcacacttcttcctgtgattagtcaattcacttgtctgctgttacacctctatgagagatgaaaattccttctccatctctggaactcatgcccttcgcatatagtaggcaatctgtaaatgtttgaaggttgagtgaattaatgaatgaccttcaacctttcaggcttccaattttctctctgaaaaggacagccaaatgaaaactcataattttagaagatgaggttagacggttggtaggtgcatgcagagaccagttattatttaggtattatggaagtttatagttcttgtatgttgagttcagtgtaagagtggccccaaacatagttaatgaccactccagacccagttgttatagagttggccccagctgtattgcttctatttaagactaggataagaaatgacactttcctactttttaccttattgaaagggtagaggctcactgttatcaatctcagttcacttgttgattgcactggcttgccaagtgagaatattagcacctctgcacatttctatagctctgccacttatgagatctttccttcccattgtcatatttaataatcaggatagccctataaaatatgcattctcatttcccagatgaggatactaaggctcaagtaggagaacttacttgtttagtaagatcatacagctaggaagtgggagaggcaagagttgaacccagatcttcctagctcctagtccattgttctgtctactgggtcacactggaccagccaggaggcaggaaaatcagctggggaatgtggtgccaacgtgtgatgtttgcctaaatgtgtgcatccttgctggaagccagccatgattcatgctgcataagtattcattaatgttcatttcatttatttggctatccatatgctttccagggcgaaggcaagctaggacaagggcagacaagcagccttaaagtttgggtgctttccttcgaagttgagctgcctgtttgaaaatcacactttttggtgatagaagatggttccagtacagattttatttattactgcatctacatggatagacattttccaaagcatagctgaaaatatgtgtaagtcccagaatattttctgatttagacacagactttgagcatgataaccacatttagcatgttaggaaattctgtcagaatgcttctggaaaggctacctttccagaatgaaatgaaaaaagaaaaggatggactttgaaactggctagatttgggttatacttactcatagtgtgaccctggcaaatgatttaacttctccgaatttcacttttcttattctttgaagtgaaattttaaaatgccatcttgcctgatttttgtgagaatgaaaatgagatcccacaccaggaatttagaagctactcagtaaatattgcttctctcctttccccttccccagtcctgtcccccgagacattcagtagttattcacaggcatgcattctgaagtctgcctactgctccatgttgaaatgcactgctcttgcaaggactgattatctatttttctgtcttccaaggccccctgtgttccactccaccctcccaattctgggggcttccaaagtgggcaggtacagaatgttctgtggagcatcggaggctgttactcaatatcttggccagcactctcaactgctctttgcacacactccatatgaaggcaaactccagatcttggagcccatgtgtgtgtcatgcattgtactgcttcttgtacccaaatccatctcaagggtgagtagaccaggctcagacttgtcctgggagcagatttctcaagctgcccatgtccccacactgtttgattaaaaggaggtgcttcaaactctttggctttatatagactagaatcagaatgattggtggtgcctctgttctcaaggtatcccaaagcactttgtaaggaaatatgacaagcgctgaggccatgcaggccagtacaacagccgccacccagcacttcacaattagtcatgcccagcctgggatcatcaagcctgtttttattggaagagcaagagagagagggaatgctagctggcaatttccccaggtaccctttatgaaagtgcccttggctcttccaatttcatctgaataaccagctcaggcaaattttcctctatcaaaaagcagaatgtgatagtgacaagctgatgcccggctgatgccccaggacattgactaaatagacttggcctcacaattggtttttattctctatctcctttcttcccttttgttctttttctgtgtttctttccccattgccatctgcagagtgttctcagtcagaagtcagctgtggggtggacagtttgtcattttaagatcatccctattctgtctacctttcttatccctcatatcattgcttttagagcaaggacaattctggaagtgaaactacaataacactctgggctcctttccctctagtagtactcaacacacttgtaattacatgttcaaatttgtctttcttatttctacttaggttcatgaaggcaagggacatgcctgtgttgcttactttctcttggcaggcacatacagcaagtcttcaaaaaatgcttgttaactacaaattaagtgtttaagaagtccactgttaattagccgggcgcggtggcgggcgcctgtagtcccagctactcgggaggctgaggcaggagaatggcgtgaacccgggaagcggagcttgcagtgagccgagattgcgccactgcagtccgcagtccggcctgggcgacagagcgagactccgtctcaaaaaaaaaaaaaaaaaagaagtccactgttagtatcttttcccctgcctagtttgtaagcaactggcctcttctatttgtaagttacctgttttcatttccatatgccccaaagcaaactttagctcacggccttacagagtgtgtatgttagtatgttaaaatgaaatcaactttcctctcccaggccttctaattgacatgaatttgggagtagacttgcattggcctttgtcctgacagccaacagagtcctcttctgttgtattcactgttgccttccatgaggatcccatggagaaagtttgtcattgatatacattttgagggcagactcaacttgagtaaacctgattgagctttccccatctgcctcccagagatcactgcctgtgctttgttaaaaagagaattataggagtcctctcaaggcagagaggcctaaaattagacatggcagccatgcctttggtgtgcatggaggttggatacaggcagccagtttcccctctgttttctcccttgcttacacagccaaggagtggagccaagcctcaaggggaggagctgtatactcgagcatgccctgtggttcctggccctgactgagggactattttatatatcccaatagagaagcgtggaagacatctaggttgccactgtcatttgaaattggaatttttaaaagagaaacctgaagacttgaagaaagctttcttttgcctccccttacagttgatttttgagcttcttaaagctacctagtccaaagtacccacactcttattcttttgtctttcctactggttttatttttttttcatcttcccaggtgtttgatgatcactaagagcttcaacattgctcaccctgaccaggtatgaagccaagagtttggtttagggcataaaagaatgtcggaactcaaggactaggttgaggtggggaagggggatgaaggcttctttttttcttgggttaagcagaaataacttagatctcagagtgaaagccttgaattatcacatatatcactggaaaagactagttctttgctatgataacaattgttcatcatctctcccctgaggatttggggtcaaggcctggctacaccttttaatgatttcagtcatgtgacttaacctctttaaacttggattttcttcatctttacaatggaaatgatgacaataatcactacctcacagatattgataataatgatatctcactaggaagagaattaagtaatatgagggataaaaaggcatttgtaaatggtaaaatgagattatgattttgaaagctattattattttcctttcactgtctattatctcaactcttctattttcttgccttttgtacagcatggataatttagatgtgactctggacagagggatggatcagatgacttcttaagttatcttccagtttaggagttcgtaaactatactttctcctttccagactatcctagtaagaaaattctcttttaagacagagtagaactctggaattcatcagttttgatgtttcttaaagtgtaatctaagatagtgctcctgtattaagttctgatgtctgaccattgttcaaataaagagtaaaatgcaaatgacaggaaattggctgcgttctgaatcctatttttatttgggataacaataagcctgtatggtcactgtgacctttgatttgctgtttctgcaacctcacacttgtctcaggattcttcttccacttctgcactttatattgggtttcttccaggcatcatattaaactttaagccaggtatgtgtatatgcatgggctgtgggcctgaaaaaaattagcccgagagagaaaaaaatttaagtagtgggctagaagtaagcatgctactagaaacagaatttgggaacacagctctgggcctagaaaagcgacctgtcaacttgttacagttaacatcaataactataggatgggtttggtggaaaattatgctgaccaacagggtgggagagaatagggtcagaatatatatcgctgtaaggttgagaaaaaaagaagtgaaaaaaaaagaaatgcatagagagaaaaaggagtttagaggtaacatgttaaagtgtgagaaataaactggagagcttgacttctcttgaatatatttttaaataaagtactcctttcaactccaaatgcagcaggcttggttcccttctcctacctccattgcggatgaaagcttaatctttaagatgggcttgggtgggtagagtacgccccttggtgagcactgtgctctctgcaaccccaataaggcccaacagggctctccaaggaggcaaaattctgatgatacatttctgtttagtggaaaatgggtagggaaaattatgtcttagaatcaattaaccaaacataaaatcctccaaggggcttggtaggatgcctagggaagagccacgagataaaaactccaggctggaagggcattgttgcagcactgtcattctccagtttctcttggagttgtcaccaccctctcctttgttctcactgctgacatcatttgtaaaataatttcttcccttaaataaacaagacatacaatcctctaaatgactaaagaacagttacctagaagaaaccttagtggaaagtattttcttcatctaacggatgattgtctttacagaggtggagtaaaggatgtgcgagggagcataatcaagctaagagatgcatgctgacttaaaaggcatgatatatgtgaaactaagataatgtgttcaagagtgatgctttgttgatgcagaaccactgaattccttactattatgtttgcctgactatcggcctcttaataaagaacttgtggtttgagtgttcattgaaattagccatattaggtttatgtggggatgtgaggatctatgtctaccaattgcagcctctgctgcaaattggaggcagaaatctgggctgaacaataggtaagagtgtcaactctacagatctctcacatgctaagcaagcacaatatagggcaatccaggtttacacaaaggattaatttgggaacaattatcctcattttcacttcctaaaaagattttgaataagatgtcttttaagtaagaagctccctgaatgcatttaaaatatgatttgattatgtacatttcagatttttctacctttctaggagtatctctgttgtataaaaacacaaaattctggaacttttgaaaggaagatgtgcctctcttcatacatttgtcattcttgaacgattgtaaaatgaagtgactgcatatcacgtcatgtgccctattgatttcttttcttgttttaggaatattcccagaaaaaaaaaaaacttttttttttttaaaatctactaagcatgctaggtaagactgaagatgaatctatttaagttatgtcaatatctatttataaagatttttgtgatattcttttcactgtagaacttcaagcatatcctaaaaggaacggttagatacctctacaaactgtggcaatgacttactgagtaattgctggcaactgatttttggtgcttcttgttttgatagtatagcagtgcgagtaggtttcagaagagcaaaactaagacaatccagggaaatgccatttgagaatttctaactttaaaaaaacaagtaaaatagtgccaagaatattatctaactaaccccaaagtctacaatgtaactcttttattttgataatgctgttctaaccctatctacttcagtcctttcccacccagctggtttaggaatcaaattcccaatgtttcatcactgttaacattactgttttactcttcactttagttcttaaatggcatagtgtcttaaattccctcagcctctttcacatttgatttctttggaaactttttaccttttcattgaagcccatatgatcttttccgaaacagacccttatctttacctccttctttggagtctttctcctacttgaatttctgaacttcttaaaatggccgctttgggttggtgtcagtaattcagtaataagttttcttttctttttttttttttctttttttttgagacagagtcttgctctgtcaccaggctgcaggctgtagtgcagtggagtgatcttggctcactgcaacctccacctcccgggttcaagcgattcccttgcctcagactcccaagtagcaagtagcagcaccatgcccagctaatgtttgtatttttagtagagtcggggtttcgccatgttggccaggatggtctcgatctcttgacctcatgatctgcccgccttgccctcccaaagtgctgggattacaggcgtgtgccagtatgcccagccagtaataagttttcttaagtgctttcttaatattctgatatttttaaaaaagatctggactattttgtcatacaggcaacagaatgttaaaccatttcataaaacaatgacaaatatacatgaatttttcatcagttataaatgcatttcctttataacattgaacatgtttttgcaactgaaataagtacggttttcatttttagaaggcacatgataaagttaaggcagtggttaattaattttttcagattaatttttcagaaaagtgactgtttctgtctattgtcttaaccccaggcatcaaaggattttaatcagaaagaaccgaggaataatttggttattttagtgcctttttttgagacaaagtcttattctgtctcccaggctggagtacagtagtgcgctcatggcttactacagcctcgatctcctggttcaagtgatcctccaacttcactttcccagctaactgggaccacaagtgggcaccacactctctgcaatttattttaatttttcatagaaatggggtctcactatgttgccctggctggtctcagaatcctaggttcaagcaatccttccacctcagcctcctaaagtgctgtgatttcaggcataagccactacactcaccctattttagagctttgtcaagctttggaaagaaaaccatttataatataatagataaattatggatatttgaggcagtttttatcatagtatacatggtaaaccacagcccccctttataatatttgtatttaataaaaatgaaaatattacttttatcttaaacatgttttaacaaagcaagcatatgtagattagcactaattaaaacaaaaacctttgtaatgatagctgttttttatatgattacaaaaaatttactatacaaatttttatcctaatcagtgtgaaaaactgcaaatattagcttatagggctagtcttcagagtcctcttcctacctactactgctaataagccaatgaaaaactctctgatgtgtgtggtggctcaggcctgtaatcccagcactttgggaggccaaggtgggtggatcacttgcactcaggagtttaagaccagcctgggcaacatggtgaaaccctgtctctactaaaaatacaaaaaattagctaggcgttgtggtacgcacctgtagtcccagctactcaggaggctgaggtgggaggatcacttgagcccaggaggttgaggttgcagtgagccaagatcacaggactgcactccagcctgagctacaaagtgaaaccttgtcaaaaagaaagaaagaagagagagagagagagacaggctcctccgctttttcagttcctaaataattttccaatctagaatgcaaaagattctgaaggaagacagttaccatttcagatcggcagaagttgtggctttaatctagactcgaatatgttttacatcaaagggttgcctcaacagtgctcaaacctgcctctctgaaaacatgctgagcacgaaggttacttgaagtcttagcttgagtacttaagagagtgctatggagggattgttgatgagagctgtgtcacagctaatttttctttagtaattaaaggtttataaaaatcttacactgtatattgacaaatttagcaacaaaatgagcttgagaaaaaaatcaaggcctgccatggcatctttgcttttttttcttaaaaaaaaaactttttagaaagattatgcgactgtattatctgtaactactgcaatggtgtaaatcctgatggtataatttgctttttaaagctatctttacttcagtataacttagattaaatttattttaaatttaaatgatatttttctctttgtttattattttataatgtttcccatagaattcacaaaattcattagaaagatttttttttacttccttaggtcattaagattctgatttgtcaatggatttcacataaaccctgtctttccaaaaatatacaaaaaaaaaaaaaatagccaggcgtgatggtgcgtgcctatagtcccagctactcagaaggccgagttgggaggattgcttgaacccaggaagttatggctgcagtgagctatggtcacaccactgcactccagcctgggcaacaaagtgagaccccatctccaataaataaataaacaaataagtaaataattttcaccttgaaaagcttataaatgtatgaaatcacaatgagggtcgctgatatagtttggatgtgtgtccctgcccaaatttggttttgaattgtaatccccagtgttggagatggggcctggagggaggtgattggatcatgagggcagttttttcatgaatggctcagcaccatccccttggtgctgttgtggtgatagtaagttctcatgagatctggttgtatagcacctccccccttgctctcttgttcctgctttcaccatgtgacatgcctgctcccccttcaccttctgccataattttaagttgcctgaggcctcaccagaagccgaacagatgccggcaccatgctttctgcacagcttgcaaagccatgagccaattaaacctcttttttttttttttataaattacccagtctcaagtattctttatagcaaggcaagaatggacttacacagtctcttttgtatcagggagagggtcttcttggtgactccacttcttttctttgtttatgtatccttccagatgatgtatttatttcctttgtttttcaattgatatttactcttaaattaaactaattatttaaaaaagcattttaaagtctcattttagattattttgactatctgatttttaaaatggtttaaaaaatctatcttggcctccatatgcaatcaaataagaaacacattttaagcatattatttaccttgtggattctgccttcctcagtgtgttcagtctgtgtatattcatttctcccacactgtaagaagctagtcagatgtataattggattatcatgctacataatcttagcacactcattttaagcatacatagactagtgagcaccactcattacatgtcatttctctagagaaactagttgggccatggctgcaggactctcacttgaaaagacatgtgtggtgatgttttctcaggcagttaagcaataaagtgtaccctgatttgcactgaaaataaagattcctttaaagggagcagttctagttatctctctctttaggtaccatatgctgaacgtttttctatgcactaaaacagcaactaggttttatactctgccttacagcctacttcacacccatttcacagggagaggaacagagaggtaagtgatttgccccaaattacataactaggaagttatttgctcagtgtggaaacttgttcagaaggtcatttcattgaaatgtaggaagagtttctggcacttctcttgagcaggagtcaaaaacctttttttgcactagcccagatagtaaacattttaggctttgtgggccatatgatctctgtcaaaactcctctacttcgttgttgtagtgcaaaagcagctatacacaatcctgaaatgaatgggtgtggccgtgttccagtacaaccttacagaaaaggcaataggctggatttggctctgagactgtagtttgctgacctcagctcttgaactgagctctttaactgacctcagctcttgaactatggtacaagatcccatggtcctgtttggtacctccatttgccctccttttcactctctgggagcatagctaagttcaaaattgaattaggtacttgtagtaagagcatacttataatcctgggatcttcatgttgccagatattaacctcttgaagtttttcaccacaacctgggcacttttctgatttgctcacttctagccccacctttgggccccttcataagcaaacatgcaggttttccagagagctgtatgctactgaatgcagaaaatttggctcatactggcctatggactatctgctcactgccctgataactattttccaagggagtgggtgccctacctttcctacatgaagttttttgctagtcttgccctaaaaattctaggtatcccttgcttttaggataaatatgtttcactgggaccagctggaaaacgaaaaatagaattatccaactaccactttaaaattggacaaagacttttgttgttgttgttggagggggtggtaaacatcattttagcagaccaaatatacttttggtgaaaggcagcctgttgcaaagacacaacacttggacaagattttgaagccctggttgcctttactactgacttaactacagtatttgcggacttgagcaagttgcttcccttctgtgagcctcaggttattcatctttgaaatgagtataatacctgtgattataattacttatctggattctgcagagaattgaaggagataatgggtgtaaaagtactttagcgcccagcactgctccttatgaaaatgaggaaataattgagatgagtgagccattgaggcaacagtacaaaaagtgctgaaaactcactgcttaaataagcacctcttactgcttttgtggcactttgtagcaatgtttttttttttttttttgagacggagtcttgctgtcttgcccaggctggagttcagtggcacgatctcggctcactgcaacctccgcctcacaggttcaagcattctctgacttcagcctcctgaatagctggattagaggtgcgtgccaccacgcccagctaatttttgtatttttagtagagacggggtttcaccatgttgatcaggttggtctcgaactcctgacctcatgatctgcccgccttggcctcccaaaatgctaggattacagatgtgagccaccgcaccccacctcagcaatgtgtttttattctgactagaaaagtaatgtttggttttgtttggctctttgcttaatatacccataataagggtacctatttgcctttggaccattagttcaaatattattttattaatatggaattactgggctccagaagccatagtcttcttagctgctccctatccccactctcacctcaatttttttttttcacttttgtttttcttctcagggaaaggtttgaggcaaagaatgtcttcttatgatccaaaaccaagcatggtggtgatttattcaccaagagattcctaagtacctgtgtgatggacatggtagaatctttgtcctgagggagctatctagatccattccttctgatatgcagccagtagccacttgtggtaatggagcaatagaaacaacactagttcaagtggaaacgtgagatgagaagtaggaggtggagagaactaaccagaagagggtacccaaataaaccagaaatatgtatgtgttagagaaggggcctattgagcgggtggcagtggcatgtgtggcattacttgctcctgtattctctgctttttacttagttgtggctttggtggtatagtctcaaatctaagttacgtaggtaatattgttatgtatcatgttttggcaatgtagactaaatacttgctcataagagtacaggacaatgaggatagtttggttttgtttactgcatggaaaatgcaggatgtttagtaaatagattcatggcgtagtgagttcactactaaaatcagactctgagaatgggtttgatttaaatggctagtttagaagactgaatttaggccacttgattgagaaaggccattttgggtaattataaaccaccaacattgtgttttgaatgttaaagcttatatttgtcttccagttaccagaatgtaagcttcttgaggagggagagaggagttttcttaatctctgaacctgcacctttcttctgtgcctagcccagtgcctggcaccaaacaggtgctcaatcaatgttgattctatgctaccaacaaaaatgagtccatgatgtttactattcaacaaatgaatacaattttagagtaaatttttactgcttacactacatgtagattttctttttagagatttcgcaatgctgatttatttcaaaataagcttgaagctaagcgacaaagctgaatgatgatttgttttttatttatttttaaatccaaacttacaattttacatgtcattgccagaaaaatcattaaataaattatgatatgcgcatatggaatactttgcaaccattaaatcaaccattaaatactatgcaaccattaaatcaaccattaaatatgttggtatatgcaaatgtgcatataccaacatattatatagttgagtaagaaaagctagtttcaaatgagtatgttaatatcatctgactcttgcaaaaggaaaaccatacatttgaatgtacatatatgcatatgtttatatgtgcatagaaaaagctatgaggggatatacctcaagttgctaaaagtggctccacctggagagggacatggaaaggagttggctaaaaactgaggtttgttatggtatacacccctgcacagtttgattttttaaaaacaatgattataaattacttttattatttataaaaatattatttaaaattttggtactaaaaacagagctccatcaacaggtcaatggataaagaaaatgtggtacatatatacaaccgagtactattcgtcataaaaaaatgagaccctgtcatttttgcaacaaaatggatggaactggaaattattatattaagtgaaataaggcaggcacagaaaggcaaacattgcatgttctcatttaatctgtggaatctaaaaatcaaaacaattgaactaatggatatagaaagtagaaggatggtaaccaaaggctagaaaggatagttggtggggcaggggagggtgaggtgagcatgtttaatgggcacaaaaaaatagaaacaatgaataagacctattatgtgatagcacaataaggtgactatagttaataataatttaattgtacattttaaaataactaaagaggtataataggattgattgtaacacaaagaataaatgcttgagggatgtatacctcattctctataatgtgattagtacacattgcatgcttctatcaaaaattttcatataccccataaatatatacatccattgtgtactcacaaaattaaaaaaaactgtgcattaaagaaaaacaaaaataaaaaccatagttcaagttataaacaaaataaaggtaatttggaggaaaactgtcttcagttatattggatatttgggggacatttttgtatgttagttagcaaagatcacttgaaaaagaagattcttccttctatgattcaagggagcctagcaaaaaataaatgaaatgaaataaaataatacaaagagaaaagattattccataaattctgcttacttatttctggcaaacttgttgacagcacatgtgaccttttggtaaaaagacatttttatatttttagttaagtttcaaatataaattgtttgtgtttttaaaataaattaaatggatgatttcagccagatcattatgaaaacacatgagatattgggttatgcaatgactaacagtgtgtaccttttcttgatatttattcataaactggggaataaaagtacattttggcccatttactccttaaataattttatgtctcccaaggagagttgtaagttgcttgatagtaaatgctatgtattttgtaccttagtgtatatattatgggatttcagcgttagaagagctcttaaatgccgtgttcatagtccaacctgtcttctgatgcttgaaatccccttgcagtaggaaatgcaaagtagagagcagacactcaataatgtagttagtgaattatttagaaagaggcattttgagcccataatgtatgataggtacttctacatttattattttattctttgcagacctgcagaaaactgtaagaaaaaagtttatttcagattcatgtgtttatttgattaatctcttcataggtttcatttttcagctcctgtcagaaaatacagattcttataaggttcaccttttacccataagaataatagtataaaggggataatgtgaaatacaatcacttcacagactgtttcaattaaataagagctcgtagataattcagtccaccacaccccattttacagatgttgaaattgaagcccccaccaaaaggaaaagacttgttcaaagtcacacagcaagtcagtggtgaacctaattaggccccctgccttccattttagtgagattcctgtgctgatagtcatacccatatcaaatcctctttggcagttatagcttgcccacagtaatgtgtcctgaaaaatatgacaattaattaagttggagacagaaccataacctctttataaaaattttctggaaagtttacatgacagtaagtaatatataattagaaaggataattcttatttcatatttatctttttgtttcagaataataaactaagctatctctactcagtccattttaatacaaaaatatttttacccggactgagtttttatgctttttaggaactttgtatctgcctcacttagttaaaatcctagctgcactaatcacttactgtggtgggcagaattctagaatgaccctgaataccttgtccttgtatgattccttcctctttaagtaaggataaaaactgtgaatatgatatcactcccttgattaggctttgttatatggcacagttaactttaagaaaggaccaatcacacaagccatttgaaagcagagggtttgggtattttttaactggtggcagaaagccacgcagagatttgaacattgaggggaatttgaatttgatgtgccagtactaacttgaagatagaggaggctgcatggaaagtggcctttaggagtgatccctggctgacagccagtaagaaaatgagggcctcagacctacagccataaagaattctgtcagtgaacttgaacttggaagtggattcttcctctagaacttccatataagagtccagcctgattgacaccttgattttggacttgtgagaccctgagcagagaatccagttgacttctgacctaaaaaaaaagtcagataataaatgagtattgttttaaactgctaattttgtgataatttgttatgcagcaataaaaaactaatatatttaccatgcaaggcaaggcatttatcctctcatgattcagtttctttttacctgacataatggaattaatttatactgctgtgaagttgtagttgagaaacatgacttctaaagtaatagaggacatgtattattaattttagtagtattaatagtaatgatactgattctcccaggcctatacaaatcctttgatacacaaatgaatagtaaaggaacataaattgtctctaggtagactttcccacaatgcaattttaggatacagaggtcatatgcctgttattctactgtggcagagaaaatatggagcctggaaaactgttcatttgcatcacatacatcttgggagctcactctgaacctggtaccataataagctctgtagacagtataaagaggaaaggaatcagacatggtgtctgacctcaagtgtctcataacgtagtagaagaggtaaaatatgggtcacactaactctactgcaaagtaggaagtgcttgtcgccttgagattgacaaaatttggtaagagttcagaggagattgtctgtgaactgggccttgaagaatagttaggatttgaataggagaaggtgaagaaggaaggcattccagctagggagaagagcacaaacaaaagcatagataaccttgaacatcatcatatgggataattcaatagttcagtataatggaagtataagatgcataaaaataagtgtagtaggaaacaagtttaaaagtatagattggggttagtcatacaaggccttgaatttcaggctaaggagtttagacattaacatttgtttttgaacaaaggggtgaactgatcacatctgtgatttagaaagaaaattctagcaatagtgtagataagggttgatggtaaagtttggaaggtggtgaggcagaggctggagacagggagcacatttaggatagaaagatgataaagagatgatttagaagagttgttttggaaaaggagaagacagaaaatgttttagaggtgtcatagagataaaattggcatggcatggtgcaaggaggtaaagcccaatagctttgtaaggtgctgagatagattgaaatcacagagttaggaagttttagagtcaggattagtaccaagacagcttggctctagatctcatacttaacacttacagtataattctgagagggtgggtaacagcaatagtcagaggaaagaacccttttatacatgatggtacaggaacaacactggcttccaaccccacagctgctctttaacagaaggtcagaagctggggagaaatatgtgtgtgtgtgtgtgtgtgtgtgtgtgtgtgtgtgtgtgtgtgtgtatgtgccatttctgggactaaggatgggaagtagattagttgaggccactgcagtggggtctgcaagttgctagcactcacccgttccaagaggccttaaaggtgttgatctgttccctgggcatcaccacattccacaaattaatgttcctctgagagaatagggtgattcaatttcactgtgcccgaaggttacttttggggttcatgtttgttctaagtctatgctaatgatctgccaactgtctgtttgtcactttctctaacccttagcatgtataaactgatctgttgggaaatgtgtagcatttataggatggtaggatttgtaacatgcgatcacaggactgtttatatagagtccctgggaaggggagagaagagtatttctgttacaaatgtggattctttggcccctcctcaaacttactgaggttcaagaattgacatttataataagcacatatccattttcaataaacatgaaagtttcataccctcttttaatgtttgaaatcctcaaataaattagtcattggtgccagagtatcaaataattatggtacagaatgtatttctctgaatgacaccttctcccagagattctgatatatattcctctgcactcaccctgtttgataattaccagtatatggaccatttacctgaagaataagagtagggtttcctactgttgttgaaaatttgcttgactcttaacaacttgtgtgtgactgtaacaagatcacacagggtaaacaatattagcttattcaaccactggctgaagaaatttaggaaagtgaacacatttttctttacatttctctttgttctgtgagccttttatgctggaatagttttcactgcaggctgttattgtctgcctccagaggagggagttgacctagcagtggtaactggagagtgttttttgaaacctctttccaaggttagttgccaatggcatctttggaacagtgtccttcacttttgtccctcagggaccagtgtgagaatgggaactttatgatctggagctggttaagtgaagtccaaaaataattaagaaagtgtttccttccctgggaatgagttcagtaggaatctcaatgtattgtagagcactaaggactcagcctcaggcatttgcaaaggattcttccagttgcctgtgttacagaggacacagttggcatttccttttggtgttgaggggagatgtgtacatggttgtgagatgactcaccctttttgcttagatagttccactttcattgtggacagactctttggagggccagtttggcatgcacgtgtgtgttcattccatcctggagcattctttatgagaaagccatttgttgagtggtttgccattttgttttacagccactctgtgggctatgaaatggtcatccggccgctttatttgtccctaaaaaaagcagtttttccctttcttatcttcatggctgccaagcagcagaaagagtaactcagggaagccatgtgatagccttttatctgtctgttcagaaactgatgatgtattggatttgataattcatcaaatctgaggtttactggtttgtatttgcctcaaaatgggcatataatattttgtcaggtaacataatagacagatcattggcattgctttattgaagtgaattaattcaataagcctgtaagtgcctgacatgtgccaggcactgtgctaggcattctgttaacagatgagacaaatctctgtcttttaggtgttttcagtcgaacaggggagacaaatatatgagcaaattgctattttttttaaatttcatagtgtacatgagtataaggtgctgaatatgtgattgattctgagggaaaagagagataagggaaagttctcagagaaagtcaagctgagggaagaaaagcaccccagacagagggactagcatagagctatgctagtacattgagtttaagggaatggcacatacttcactgttgcttcagcagacagcaggcctgttaggttacaaagggccttggatgacatgctgaggggttttaaaattttatttaaattttaattgacaaaatataattgtatatttctgtgaggtacaatgtgacgttatgatatatgtatgcaatgtagaatgattaaatcaagctaatttgtatatctaccacctcacatacttattttttggttagaacatttaaaatttattctcttaacaactttgaaatagacaacacattattatcaactgtagtcaccatgttgtgcagatctcaaaaacttctaacaaaaactttttaccctttgaagatattgaactgttttatgaacacaatcttagaaggatttaaaaaataatttgctattcaccaagtacttcttacgtacactgtgcatgaaatgattattactttttctaatattagttttcttgattgaggcttggcaattattagtttgtatgcctttagaaggatcataagcagaggtttatcccagtaggatttgcattttagaatgatgactttgggagtaaaatacagagaagtgaaaccagagatagtgggatcattctggagtctgttgcctacactgaacagtagttgagcgaaaaaggatgggcagaatgtgttggttctgggtattgcaaattcatggcacttgagtgaaaaagtttaagccttctattggctctttgtgaatatcttcaacatgcatgactacaaatagaacacatggttttgttgttattgttgttgtgtttttgtttttttttttatttgagatggagttttgctcttcttgcccagactggagtgcaatggcacgaatttggctcaccacaacctccgcctcccaggttcaagcgattctcctgcctcagcctcctgagtagctgggattagaatcatgcgccaccacacccggctaattttgtatttttagtagaaacagggtttctccatgttggtcaggctgtcttgaactcccgacctcagatgatcctcccacctcggcctcccaaagtactgagattacgggcatgagccaccgcgcccggcccacacggtatttttgaaagaacagtgagcttggattagaacactagtgtccaggccctgctgctactacataagtaattatgaatccatagccatcttgttgctcttcttctctgagccttggtttctttagctataaaatgggaagttgaaactttctagctacttctttgagttatgagtaacaagttaggtaatacacttaaaagagaatgtgctatacaaatactggttcttaagacagctgttgttaatgtactgagtattatgcttacctcacagggttattgtgagcatcaaatgggataatggatttgtaagcattttgtttaaagtgtgattcaaatgttaagaattagtaaaaatagtaaaagaacaattcattctccatccagatgttctgtccccactgtgacttatgtgctcattcagagttgtacagaaaaacctccacttaattttcacaagctggagttccacatgtaacagaatcatatgggaccaaaaaattctctgtattggcttcttccctgccgtattttggctctgggaccaacaagacacccattttgcatgagctgcctgccaccaactttgcgctcacatctagttctgttgcccatgtgcaagctgaatttgggcccgggcccccagatctaacatgaaactcaagtttccttctgttcaaactgtccaggcataatagtcttaaagtccgatgcccagcagagccgtagatttttcactggccaaaaatcaacatgaaaccagatgtatctgtaaatctagtttcataacactttgtagtcaatggaaatacagtagcaggcagaccagaccagagtttactatttgcagtggaattaataaccacatggaaactttgcctttggtatctgcgagatggaagataaaggtgcgaattcaaagcagttcccaccttaccctctaaattccaacataaagaggccttgaatgtccttctatcttattgtatatttcattaacagaagtatgttcctagctacttagtcattctatctctattctcctttgttttaacttcagtggtgccagcttaagatgctctggctttcagctttcatggagcacgtcatgtttttaaacttatctttagggacagaaatgttaggaagatcctagttcctcatctctttgctcctgacaaggaaatttagaattgcctaaagaaaggatgtattggccaacctaataataaatcagtattagtgaatctaaagcatatttgaaaaatttgtaacatgagttgaaattcagacctgcaatgaagtgtttttaaaagatttaaaatcgaaataatataaaagaatgttaaaaacaagtaaaacatatcactagttaatcactctaccaaaattcatttttatgtttgcatatttaaccatttttattttctatatttgtccatgaacatgtgtttttatatattgtttatattaaacatggttttaatcatggcttatttcttttatgttttacttcttttcctttgacataaaatattgtattttttaaattttaattgcttcttggcatacccttccaatattggtggctatatagattgaagttaaaactaattacaatcagagaaaattaacaattcatcccttcaatctcattagtcacaagttaaatactcaatagccacatctatctagttgctactgttttgaatagtacagatataagacattttcatcaacacagaaaattcacttggaaagcattgccctggagtaaatgtgccagactgtactatatcatttttctcttgttggacatctaagttatttcttattttttaaatattttatataacttgacggtgaatatacctatgtacatagctatttgctttggctgaattatttcttagaatcaatttcaaaagtggagttattaggtcaaagagcatgagaagattttttggaacctgcagtgtattgccatagtcctctcaaaaaagtttatgtcaacttaaagtacttctagcagcatatgattgtactaatttcgctgcaatctcaacaacactggacattataagtttttattctaccctattttccattaaaagatagcttatgcttgattgactttgcattttattttattattaataatgatgtggtttccttttttctagattttatttttatttaaggcatcctttgattttaacctgattttttttctctaaaaattattctaagaaaagacaaaggtgatacgaaatatatcctgagtttttatttttttcttgcatgggatttgtatatttgcacctttgcccatttatactatgatttcttagtgtcttccctggcaattttaatgaagacttcatgtatatcaatttttccacaaatataatctttctaaaaatatgttttttccacaatataattcagacgtattctccgaaatgttggaaaaacttaagtaggcatcaaagcatttgaagatttgtttaaaggttgtttttataccagttttaaattgtaatttaagggtcataaaataggtgaaaattaaatcatttttcagtaagggggcaagaccacttaactcttggaaaatacaggaaacgtagatttctagaggccaagaaggaggtagggattattttgtaactgcccccaaccttctaacctgtaatgaaacaaacactgaaggcccttaaacatttttaggcttaattggctgtccttgtacttagggcacatctaaaaatcctgaggcaaccactcaagagaacatgcttttgttaattcaaagggagctgtcctacgagtgtccagaatcctctgtagtcttgggcctggtgcttgagagacccaaaggaaaggtcaatggaattacagcttagtgttagagctttcatgcatcacactaattaattaatgtcataaaggtctctctcctgttatgggaaaaagcagcaaataggaacttctggtagggtgcttaaagttggtttgatattttttattagcatttttaactaatacaagtaatacatgcttatggtagaatgataaaactgaaaaaaaaggtatgaaaatttagaagttctcctactcatgacctcaccccttctttcactcccagtttcactcctcagagggtaaccacagtgactagcttcttgtgtttggttcctgagattttctatgtatatatattgttagatatatgcatggtatgttttcaaaattcctgttacactataattactgttctacaacttaattttttcacttaattaatagaccttatatatgcttttccatatcggtatatatagatctatataagttttcttaaaggttgcacaactttcaattgtatggctgtcttgtaatttactttttgtttcccttactaatggatatttcatgtttccctaactcttttgatattaagagtagtgctgcaattaacatccttgagaggcagtatatatggtgtttaagatgaatggttctggagccagactactttggattgaatattggtgccaccaattccttgctgtatgaccttaggcaagttgcttaatttctttgcctcagtgtccttgtgtgaaaaaatggaggcaataatggtcactatccagtagggcttttatgaggatttagtaagttaataatgcactttaagaacttagttatttttagattaagtagtgaaggactatataattgttagtataattgtatacctttattatcatacttttgcatgtatagcaataagacaaattcttagatgtttaaccattggacataaggaatgtacgcattttaagtactggtagatattaccttttccctgccaaaaattgcaaatattggatattaactttttaaatcttagtaaatctgataagtataaataacagtttatcatcattttaagttgcctatcttaattttgtgtgaaaatgattatcttttcacatgtttttttggccatttatgtttctttccatgtgaactaactgttcctggccattgcctatttgttgttgctgttactatatggcttttcatctgtttcttattggtttatggagctctttgtatatacaggaatttagcctctatttatatgtgtgacaaatactttttccaatttatctttaaaatttgtttatgttttcctattcatcagtctaaaattatgtagttaaattcatcattgttttttcttatgactttagagtttggagatcatgcttcaaaggtctttctaggtggggatgatttaaatcatgtactggaagtatttttgccaaaaagactcacgaattatggatgttagagctaaaagggaccttagagatttcctagttcaaccaccttttcttcatacctttttaatttttctctgcagatgaaaagaagtttagtcctaaagaaagaaaagagtctaaaggttctccagtaagctaatggcaaaaatgtagactggaacttctagctcctgatgtgtatttcagtgatcattcaatttaaccagatggtttcacaaaaagagctttctactaaaaaataaaatacatacttaagcaactcagagaattttttttttatttttcagattaattttcacttagagattcatcagcatatgtactatacatgtacaaatcacctgtgtgttttggatatttagttaaacaaatgtgcaaatattttaaccaaaggagcatattcatttgtgttttattttcttaatggttttcgttatgaatgtgaaatgtgtatttaccttaacagaaattaagtatatttttggtctgacatatatgagaactgaaaagcattggcttggctgctaactgcattctcatctttctttctctgctttggcaaagtctgggattaaatctaataccttttaaactgtttgggacttcagccagagtgacctgtcttgaattcagaactgcgcagatcattccccattctaaggccctctcatgcctcctcattgcctgtaggatgagatccaagtaccttagcatagcttatgcactgtagtcacttgacctctagcacctatgcagtcttccagtcttatttacacattcctttgcacatgctgtttccccgtgtggggcaacttttttcttgcctgtctgcctgcctaagccaacttaaataaacatcatttctgtaacttctgtgaagccttttccaatctctccactccaagacgaaggtgtttctataggcatgacttctggaatggcagatcaaggatctggtggaccctctactcagtgaaacaaccgtttaactagtaaaaatgatcaatcaaccatttaaaatcttcagaaaatatcctaagggcacatagcaaaaagagaaacatttattcaagaaaagctattaagcctcagtaaaaacagcaagagtctatggcatttgagtcatgacctgttcctaatccttcccttatctccattcttcaggcaagtgcaaccaagaagatggaggcttcctctctctcaaaatcttactccatagttataatttcacccacaatggggcagaccacaagcatctcttttttttcccccagccctatattacagaatcactgttctaggaaggcatagcttagaggattggagattccttccacacccactttctacgtatgagggctttgccccagggatggtaagtcaagaatacagggatcctgcttgtgcctgcctcagctcatatataaggtaaagcttccacactaggaaaggcaaattaagaggactagggaatataccgttatccccagggtccacttgtagaacaggggtgtcattctgggagaagcaggtcactgccccacttgtggaacaggggagtcactcgtcactgtccctggttcaaattctattgcagtgacagaggttctgtcccagggaaaggcaggttgttaggatggagaactccacagttctccctgaggtgactgactttatttggaacagagcatgaagaagttcatgcctaagggcactgtcaaaaataatggagatcttggtggtgagcaattaagagtggattggtagctccatgatactagtaacaacaagcaaaacagcagaccagcatggaggataccagagaaccagacaaaggaatcactaagaagagcccttgtggaattgcactcactgctgggtgtgtggaaagttatgcatgtgtgctttactgtaccctctcaaaagcaacctaaacaggatgtggggtaggctctaaagcattcctcaagccacacatggatccatcagtaaaatgtggagggcttaaggataaaaaggcttaagtacaatctctggccctacattttctaaatgttatgccaccctgaccaaggggcaactcctacaaagccaggcaaaataataaaatcatatttgtctctagtggaatggataactatgcctaaaactgtgccctttgaaaagcaactagagagataatttctgaagtgtttgtccctacctgaatgtgtggcaaaattctaaactccctgaagtgtgaaagtggtttccaagccacatgcacatccagtagtggtaaagggtgaaaatctaactggctaagagggcttcatagcaacattaaccaaaaagtggtttatgtagtctttgcctgcttcataattccctaggcattctatgctattctgtactcagaaggcttaaagtcaggttagggaaaggaggcctatgaggttactgtgcagaggcagtgctgggaaataaatgaagttaaataaatttaggccatcgtggtttaaagaatggattgtggagataagaaggataaaggaaacccagagtcaagaaaaataaaacttttcattggtgccatgccaacccatatccgagcctgaggcaaaaggaaaaatgtgctccctgatatacacttatacaaaatatcaactaattttatttgttggactgaatagaaaaagtcaacaaaaattaaaaataaaaaaatcatgactatatttttaataagtggtttatgtaaacccagagttgaccaatgggatgccagtctcaaccataaaaacaaacaaaacattgtgagtaacaacaccagaagtctcaaagtgtcagggaaaccaatttcacagaagcagttcagccaagtcactaaacaaacaaacgactaagcaaaaaacaagaatgagtctcagaaagggtcaagtcagtatccagagttgttacaatatagtatctaaaatattgttttgaactaaaaattttgaggcatgcaaagaatgaggaaagtatgactcatacatggtattatatgaaaaaatcaacaaaaaactatccatgaggaaacaaagatgttgaaattcactagggaaagactttaaaaaccagctatttaaatatattcaaagaactgaaggaactatgtctaaaatactaaaataaagtataataacaatttcttgtcaagtagagaatgccaataaagagatagaagttataaaaaaagaaaaaaatggaaaatctggagttgaaaattataataactgaaatgaaaaattcactagaaaaggtcacaagaagatataacttggcagaagaaacaatcagcaaattagaacatagatcaatatagattattcattttgaagggtagaaagaaaaaaagaatgaagaaaactgaagattcccaaagaaatgtaggacatcttaaagacacatcattaggagaagaaaagaagggaaagaaaagagcagaaagaatattttttaaaaaatggataaaatcttccaaaatttaatgaaaaacatcaacctacacatcaaagaaaatttttttaaaacttcaagcaggaaaatgtaacgatattgatacttagatacatcatagtcaaaatattggagtcaaatataaagagaaaattttgaaattagcaagagaaaaatgaaatggaaccacaataagattaacagctgattctcatcagaaataacagagagcagaaggcagtgcaatcccatattctaaacgttgaaagaataaaaaaactgtcagtcaagaatcatatattcaacaaaactatctttaaaggtaaaaatgaaatgaagacattcctaggtaaacaaaggctgagagaatttttcattagctgacatgccttgcaagaaatactaaaagcttcctagacagtagctttaatctgcatgaaaaaaaattccaataaagggaaatttgtaaataataaaaatacatcattatatattcttttccacttaacttatttaaaatcaatttcttaaagcactatctgtaaaattgtattgttatttgacaataaaatgtaaaagaggggagtgggaattaagctaaattggagtaaggaaatggtatcacatggtaaattgaatttacagaaagaaatgaaaaaattaagtggcaaatatgaagagtaacattaaaaacttctataaattaattgtggcctcctttcttcccttagcttctgtaaaagacataagactattaaaaatgacaataattataaacacattgttttattagtaataaacatagacaaattatctacaacaattattattatacaaggagagggaatggagctgtagaggagtaaagtttttataacctactggaactaagtcagtataaatatgatgtcgattctgttaatttgagatatatgttagaagccccaaagtaatcactgagaaaatgatgcaaaaatacagttttaaaaagttaaaaacatagtttagcttatgtgtgcctagtactccattattatttttttattatattttaagttctggggtacatgtgcagaatgtgcaggtttgttacataggcatacatgtgccatggtggtttgctgcacccatcaatccgtcatatacattaggtatttctcctaatactatccctccccctgtcccctaaccccctcaacaggccctggtgtgtgatgttcccctccctgtgtccatgtgttctcattgttcaactcccacttatgagtgagaacatgcggtgtttcgttttctgttcttgtgttagtttgctgagaatgatggtttccagcttcatccatgtccttgcagaggacatgaactcatcctttttatggctgcatagtagtccatcgtgtatatgtgccacattttctttctgcttgttcccaggagaaagtggctgaagattccagagagaagctgaatgcagtttaattctttttgccataaacacgacaacccattttcctgcaagctgtgttagtttgctctcttcttggttcattcattcatttattcatagcttccataaatatttaacaaacactaattaggggccaagccatgtgctaggcacaggggataaaactgtgaacaaaacaagccccagctactcttaaggaactgatagacaaatggaccagcaaacacgctggtcctgttttgaaggcaaagcgcctggtgctcctgatctcatgagcacagagcatttagcctaagtctcatcctcctaaggcctcagaaataaggccttattttaataagtgcaagtcagtcatttgaagactaaatcatagaatcctagaaaactagtaccgggagcaaggcaaaagaatgggatgagcatgaaacatatattcagaagttgtggtgtgtaggtatataagccaagctcttttcttcacttgcttgctaagtcacttagcttttctgcctttttgtttgctctgtctggaaatggagttaatgaaatatatctacatgatagggatattgagacgattaaataagatgctgctgtcacccagtatgcccttaccctgctgtacttagaagtatatgaaattcattttctaaatttttgtatgagtgtttcatgcatgcccaccaccatggaagctaccttaagacagtgagggactttgtttaacttgtttgtactacatcctcagtctaatggtgtctggcttatggtaggcaccaaatataattttattgacagaaaggatgataatgaatgtgaaggcatttttaagtttatgaagtgttgtgcatattgttgttaattttaagctgttacgttaaagaacccctaatccaactctcttgagttttatagatatcatagaagatatatcttcccttgacatagaagcttcccttgaaggttcccttgactcatgtatttgcctcacagtgattgtgcagatcccacaagataaatttatgtgaatgtgctttatgtgcttgaagtgctccacaaatatgggttttataagatgagaaaatagagtcagggagaaaggtgactgatccaaggtcatgcaaagagttagtgtcagaatttataatggaatttcaggctcccaactcccactccagtatactaaggcagattccagagaagaaacagtggagagcaggcactgatgagggacaaagaaaagcaggctccgtctggctgcaacttgtctcttcatggcaaaaagaaactaggaaagtgctatgccagagacgacatgataactttgcagaatggaaagagcttgtttaccacattgaatactttatctgtgtttatctaacgacagttccaccagctctttaccacttgacttttgcctaattcaaaaatataccaactatgaaacattttccttctcagtttttattctagattacattttgttcaactttatcttaatgtgtagtgtagaaagagtaaggtaagagtatagcaagtggttattttccatttctactgaggacagagaaataatctaagggatttgtattagagatgaagaagtgcatggccaggacatgagagatactgtgatagaatggatattgtgaagtctttggtagtttttgaggggaaaaaagagaaggttttctttgtctgatatagtttagcaacgtcttaatttaggattcaaaagttgttcagggtccatcttggccttcaaattaagatgccctttgagagataacattgttgttttcaaactctgttctgtgacttaagaatgagaggagaaggaagaaaagaggagaaaatttgagggaaaagtgcccaagcagcgtcaaggctagacactggaaatttatcaatgaaagccacatggtggatgggaatcagatatgtgcatcaattatttgtgttccaatccatatagaagtaccgtataatgcaccaagctaataggtgctttgaaagaagaccatacaagtggagatgtgttcctattctatctagggatagagtcaggaagggcttcattgaataagtggtagcctcttgggctgagacctgagttatgagatgatgtggcaaaggagacagatggctgggggcaaggtggggtcattgaaattggaggcagtagcaatataagcaaagctacaggggcatgaaaaagcaaggttagattagtgaattgcaacagggtggtactgctggaaggtcacatggaaaagattgtgaaggtattgagataagaagctagaaataagctttgaatgccatcctagtactttgaatttgcatgctgtaagccaagtggttttcacttggtcatttaataaaattacagattctcaggtctcacctgtaacttcagattcagaagagtctgctaactgaaggtggaatcagtgttccatattgctaattagctcctcagaggattctaatatatcagtgagttatgaccactgctgtaagccataggtagttattgaaagctgctatggagaggagccacagaagcagatgttttagataggattcctctggggtcctgtgtaatttatggactggagaggatcagacaggaagcagaaagacttgaataagacagttgcagttattttggaggcaaagattctctctctctctctctgtgtgtgtgtgtgtgtgtgtaattgtaggaactatttaggcagtaaaattaacagatattagtcactgattgactgagtggatggcagtgataggtggggtgcgttgagggaagtgtattacattaagtccaggatgactcatggttttctaagttgagtcattggggattgccatccaatgtgagaaactatatagtcttatcatagttgatcttggaggtagacttgaattaaaatcttgaagccatcaattgctgtatgtgggtcttgggcagaacacttaaggtttctggacctcagttatttcttctgtaaaatgaggaaaataatgcatacctcatgcatttgttgtaaagactaaatgaggttaaagtatgtagagtgtagtttagtaactgggacgtatagtggtccagtaaacatcagctgttattattgtgctatatgttgtgatgtgtactggagtgagatggggtaggggattttttagtctctgccaatgactcctctccccatgatcaaaatcagaaaatcagtctcttatgtgttgaggagtgagacacttctcccaagtgtttaaggctaataccttgccttgttttgccttgggccagacctcactacacatctgtttaagagatcagggtaagctctgttcttggtgagtatctcaatggggctgtttttctagttcttgtagtttctttgggccaacatgaaatgtctaaccttggcttcttggttgtggattctcgtcaacatttcactgctacccaagttgtgtctgcttacatgatgctatcttccttcttttgggtttctgaagccctcagacacttggctgaacatttttcacatttcttaagctatatcatctgtgttttccctgccacagacaaagtcacaaaaggactttaagataggttttggttttttttttccccagggtttttatacattttgggtaagggcaagtggtaaatgctgcttttctgccttaaccagtagtgtctgacagaggaggtagcatgatgattgcagagctcactggactgaaagtcagatgctttacccgcctagactctagtaccaaggggaagatggagtgagatggggtaaatggggagaaattaccatttattttgagtgtgccaggccttttctcatgtattgtctaatgcatttgtcacaattctctttgggtttgaaatgtgattttcttcattttatagataaggaaacttatgggaagggaggttaggttcatcttgtgcccaactttacatggctagtgatcaataatagtgagattcaaactcagatttctctgccccaaagcctttgctttttcctcttttgacactgtaactaatgagaagatgtatttaactctgagtctcatttgcctcaactgtaaaatggagctctgtaactcttgctctgtatgacagtaaatctcctcagaccagacttatgataggggataaggatatttgtatctttgggcccctaatgtattgaaagtgcttctaagtgcctggcacatagaagggcactcaataaatatttaccacattttccagaaagagggtagctccataatgggtgagatacattttggtggctactgtagtgtttaatgcttttaccatctgttaaaatgattttggagtatagctagataactgatgatggttgttatatagattttttcataggttgcctgttccaaattctatgccgtggaagaagttaaatatccagaatttgacaggaaatattattctacaacagatccctggcgtaagaatgataacacctgtgttctagtctcagacttgcctctgaataactgtttctcctggtcaattctctgtctctatctaggcttgaaatttcccccaaatgatgaaggagttggactagtttagtggggttcagcctcgagtggccattaaaattatttggggatctttgaaaaaaattagatgcccagatttttgtcgttgttgttgttgtttttgtttgtttgttttttaattatactttaagttctgggatacatgtgcagaacatgcaggtttgttacataggtatacacgtgccatggtggtttgctgcacccatcaacccgtcatctacattaggtatttctcctaatgctatccctccctagtcccctaaccccagacaggccctggtgtgtgatgttcccctccctgtgtctatgtgctctcattgttcagctcccccttatgagtgagaacgtgcagtgtttggttttctgttcctgtgttagtttgctgagaatgatggtttccagtttcatccatgttctttcaaaggacatgaacccatccttttttatggtggcctgatattccatggtgtattgaactgctcactccagttcaattaaatcagaatacagaatgttgagaggagcatcagtattttaagaaggccccctagtgaagttcaatgtgcagccaagggtgagaaacactggactagatgattgataagggccatccaactttgatagtcaacaagagacaatgctatagagtatggtggacagagcatgggctttagagttagccaggtatgcattcagaccctggctctgttacttactagttgtgtgatcttgaagaaatcaaaatggagatacactatgtacctggcagtaatagttgtggggattaagcaccttcaccagagcttaggacataataagcccccagtaaatagcttctttaatatcagaagttcagatggaagatgtgagaaaaatattggttcagtaagatttaacaggtaaattaaaatcaagtatttgaaaacattttcctgtttctttagcaatggattccagaaacataatgtggaaatagctctcagtccttagatttgatgacattgcagaaagaaatctggctagtcgtcccatggctgattggctatgatggctagaaagccattggaaaaaaaaaattggctcacagaagacagcagatgtggcttgggaaatgcaaggacatgactgtaataaggatttgtctatccagccccatttatgagagtgattccaggagaaaaggacagatttgtattgtcagtgggatacgctgttaaaaaacacttttgctactaccactccagctgtcttggcatgtttgttggtgatgtaagctacagaaaatggaaatcaccaatagggctatagcaacctgatgcatagtgacaagtaattgttctattcatggttatgtgttgtacagagcacttgctgcatgtcaggtttgagacttgagtatgcattagggccatggacacccccatcttatctttaagtagatttcaaagtaaatatttgatgaatatgtaaaatatttagtttggtcagtcatagggctgagaacatggtggcagttacctcctagtatctgcaagcaaaaaaagttttttcttcctatagcaattgccatctcagccacttttgcagcatttctttttgctacactttgcattaaccatttgtgcacttgtcttagcctcaaacaggccatgaaagctccttgaggataggggctatgtctttttcatctttatatatgcatcatttagcagagctgtccctttataatgtactaattactgaatgaagggatgcatagatgaataaatgaatgaaaagtaggagtgacctgtcttctctctttcttcacgatggggactagtgtgtgtatataaggggataatttttgtgtcacataaaatataaccttacttagaaggcaagacttccagaatggtggaatgagaaccacccccccgcccccataaatccgccctttcatgaaagcagtgaaaacgctagcaaacgttgtgaaaattaacttttccagaactctggaaaggaaacagaggcttccaacaatctgagaagaatgtattcaagaaaaacttcggtaagctctctgatcacagtggaaataataaacaattagtaatagaaggatagttgggaaattcaccatttgtgggatataaacagtggatcaaagaagaaatcataagggaaatgagaaaatactttgagattaatgaaaatgaaaatacattgttccaaaacttacaggatacagccaagctaaagcagtacttaaagggaaatttgtaactgcgaaggcctatatcaacaaagacaaatgatctcaaatcaagaacctaaccttccaccttagactaggaaaggaacagcaaactacaaagaaagcaggaagaaagactaataaagactaaaagggaaataaatgaaataatagagtagaaaaacactagaatcaatgaaattaaacattgattctttgaagagatcaacaaaactgaaaaaaactttagtcagattgaataagaaaaaaagagagaaaattcaaattatcaaaatgagcaatgaaaatggggccatcactacctaccttaaaaagaattttcaaaggattaaaagaaaatgccattgcattagttcattctcacacaactataaaaaagctacctgagatggggtagtttatgaagaaaagcgctttaattgactcacagttccacagtctgtacagcaggcatggatcatgaggccttaggaaatttacatcaggtgaaaggctaaggggcatggaagacatgtcttcacacggcagcaggagagagagcaaagagggaagtgccacacacttttaaaccatcagctctcatgacaactcactcactatcatgagaacagcaaggggaaaatctgccctcatgatccaattacttcctaccaggtcccttccccaacactggaaattacaattcaacgtgcgatttggatggtgtgacacagagcaaaaccatatcaaccatactgtatgccaaaaaattagatgacctagatgaaatggacaaatactcagaaaaacacaaactatctaaagtgaccagtgaagaaacagaaaatctgagtagtcctgtaacaagtcctgtaacaaaactggattagtaattaagaaacttcccacaaagaaaagcccaggttcagtcttcactggtgaatactatcaaatatttaaggaagatttaatccttcacaaattatttcaaaacttggaagaggctggaaccctttccaactaattctgcaaagtcagcattaccctgatgccaaaaccaaagatatgacacaaaaataaaactgcaggctaatatcacatttgaatatagataactttctaaaaatctcaacaaaatgctagcaaacagaattcagcaacaaataaaaagggttataaagggtgaccaagtaggatttatctctggaatgtaaattaacattcaaaaacctaagaataggaggaaactttcttaactttgtaatggacatctctgaaaaacacacagctaacatcatactaaatagggaaagattgaaatttttccttgtaagatcaggaacaagacaaggatgactgttctcaccatttcaatttaccattgtattgtagattcaagtcaaggcaattaggcaaaaaaaaaaaaaaaaaaaaaaaaaaaaaagaaagaggtaaaaggcacccatattggaaaggaagaggtgaaaatatctatattcacagatgacatgatcttatacaaagaaaaccttaaggaatccatgataaactattaaaacgagtaaacgagttcagcaaggtttcagaatacaagattaatgtgcaaaaatcaattgtatttctgtacactagcaatgagcaatctgaaaatgagattaagaaaacagttcactcacaatataatcaaaataccagaatacttaaaaataaatttaacaaaagaagcgtaagacttgtatgctgcaaaccacaaaacactgtggaaagtaattaaaaatctaaataaatagaaaaacatcccttgttcatgtactagaggactcaatattgtcaagatggaaatactccccaaagattgaaggaaatccctatcaaaatactggctgttttcttagcagaaaatgaaaatctgaccctaaaattaatatttaaatacatggaacctaggataaccaaaataatattgagaaagaaaaacaaagtcggcgtacccatgcttcctgattccaaaccttattacaaagcagtggtaatcaagagtgtatggtattggcataaggacaaacagatcaataaatggaatactattgagaatccaaaagttaactcttacatttaagaccaattgactttcaaaagtgttgctaagacatttcaatgaggaaagaatagtcttttcaataaattgtactggaaaaattggatatccacatgaaaataaaagattttggaccacttcaaacctgcaaaaaaaataaaatgatctcatggtgtatcatggatctaaatgctatagagctaagatgataaatctcagaagaaaatatcaaagtaaatctttatgaccttgaagtaggcaatggttttttggctataacaccaaaagcacaagcaataagagaaaaaaaatttttttaaaaaaacccttgattattttattaaaattttgttgtgggtacaaagtaggtgtgtatatttatggggtatatgagatattttgatacaggcatacaatgttcaatgatcatattaggataaatgaagtatccagtacctcaagcatttatcatttgtgttacaaacaatccaattatactcttttagttatttttaaatgtacagtacattattattgtagtcattcccttgtgctatcaaatactatatgttattcattctatctaactatattattgtacccattaaccatccccactcccctgcctcccagctacacttcgtagcatctggtaaccatgatttcctcttatctccatgagttcagtagtttcagctcatggagatagacagaactaattttattagctcccacaaattagctcccatgtcagaacatgtaaagtttgtctttctgtgccaggtttatttcacataacataacgaactctagttccaaccatgttggtgcaaatgacaggctctctcttttttttttttttttttttttttgagatggagtctggctgtctcccaggctggactgcagtggtgcaatctcagctcactgcaagctccgcctcccaggttcatgccattctcctgcctcagcctcctgagtagctgggactacaggcacccgccaccatgcccgactaattttatatatatatatatatatatatatttattattattatactttaagttttagggtacatgtgcacaatgtgcaggttagttacatatgtatacatgtgccatgcaggtgcgctgcacccactaactcatcatctagcattaggtatatctcccaatgctatccctcccccctcccccaccccacaacattccccagagtgtgatgttccccttcctctgtccatgtgttctcattgttcaattcccacctatgagtgagaacatgcggtgtttggttttttgttcttgcgatagtttactgagaatgatgatttccaatttcatccatgtccctacaaaggacatgaactcatccttttttatggctgcatagtattccatggtgtatatgtgccacattttcttaatccagtctatcattgttggacatttgggttggttccaagtctttgctattgtgaataatgccgcaatgaacatacgtgtgcatgtgtctttatagcagcatgatttatagtcctttgggtatatacccagtaatgggatggctggttcaaatggtatttctagttctagatccctgaggaatcaccacactgacttccacaagggttgaactagtttacagtcccaccaacagtgtcaaagtgttcctatttctccacatcctctccagcacctgttgtttcctgactttttaatgattgccattctaactggcgtgagatgatatctcattgtggttttgatttgcatttctctgatggccagtgatggtgagcattttttcatgtgttttttgggtgcataaatgtcttctttttagaagtgtctgttcatatccttcgcccactttttgatggggtcgtttgtttttttcttgtaaatttgtttgagttcattgtagattctggatattagccctttgtcagatgagtacgttgcgaaaattttctctcattttgtaggttgcctgttcaatctgatggtagtttcttttgctgtgcagaagctctttagttgaattagatcccatttgtcaattttgacttttggtgttttagacatgcttttggtgttttagacatgaagtccttgcccatgcctatgtcctgaatggtaatgcctaggttttcttctagggtttttatggttttaggtctaacgtttaagtctttaatccatctcgaattgatttttgtataaggtgtaaggaagggatccagtttcagctttctacatatggctagccagtttttccagcaccatttattaaatagggaatccttgccccattgcttatttttgtcaggtttgtcaaagatcagatagttgtagatatgcggcattatttctgagggctctgttctgtttcattgatctatatctctcttttggtaccagtaccatgctgttttgattactgtagccttgtagtatagttagaagtcagggagtgtgatgcctccagctttgttcttttggcttaggattgacttggggatgtgggctcttttttggttccatatgaactttaaagtagttttttccaattctgtgaagaaagtcatcagtagcttgatggggatggcattgaatctataaattaccttgggcagtatggccattttcacgatattgattcttcctacccatgagcatggaatgttcttccatttgtttgtatcctcttttatttccttgagcagtggtttgtagttctccttgaagaggtccttcacatcccttgaaagttggattcctaggtattttattctctttgaagcaattgtgaatgggagttcactcatgatttggctctctgtttgtctgttattggtgtataagaatgctgtgatttttgtacattgattttgtatcctgagactttgctgaagttgcttatcagcttaaggagattttgggctgagacaacggggttttctagatatacaatcatgtcatctgcaaacagggacaatttgacttcctcttttcctaattgaataccctttatttccttcttctgcctaattgccctggccagaacttccaacactatgttgaataggagtggtgagagagggcatccctgtcttgtgccagttttcaaagagaatgcttccagtttttgaccattcagtatgttattggctgtgggtttgtcatagatagctcttattattttaaaatacggcccatcaatacctaatttattgagagtttttagcatgaagcgttattgaattttgtcaaaggccttttctgcatctattgagataatcatgtggtttttgtctttggttctgtttatatgctggattacatttattgatttgcgtatattgaaccagccttgcatcccaaggatgaagcccacttgatcatggtggataagctttttgatgtgctgctggattccgtttgccagtattttattgaggatttttgcatcaatgttcatcaagcatattggtctaaaattctcttttttggttgtgtctctgcccgtctttggtatcaggatgatgctggcctcataaaatgagttagggaggattccctctttttctattgattggaatagtttcagaaggaatggtaccagttcctccttgtacctctgatagaattcggctgtgaatccatctggtcctggactctttttggttggtaagctattgattattgccacaatttcagatcctgttattggtctattcagagattcaacttcttcctggtttagtcttgggagggtgtatgtgtcaaggaatttatccatttcttctagattttctagtttatttgcgtagaggtgtttgtagtattctctgatggtagtttgtatttctgtgggatcggtggtgatatcccctttatcattttttattgtgtctatttgattcttctctctttttttctttattagtcttgctagcagtctatcaattttgttgatcctttcaaaaaaccacctcctggattcattaattttttgaagggttttttgtgtctctatttcctttagttctgctctgattttagttatttcttgccttctgctagcttttgaatgtgtttgctcttgcttttctagttcttttaattgtgatgttagggtgtcaattttggatctttcctgctttctcttgcgggcatttagtgctataaatttccctctacacactgctttgaatgtgtcccagagattctggtatgttgtgtctttgttctctttggtttcaaagaacatctttatttctgccttcatttcgttatgtacccagtagtcattcaggagcaggttgttcagtttccatgtagttgagcggttttgagtgagattcttaatactgagttctagtttgattgcacggtggtctgagagatagtttgttataatttctgttcttttacatttgctgaggagagctttacttccaactatgtggtcaattttggaataggtgtggtgtggtgctgaaaaaaatgtatattctgttgatttggggtagagagttctgtagatgtctattaggtctgcttggtgcagagctgagttcaattcctgggtatccttgttaactttctgtctcgttgatctgtctaatgttgacagtggggtgttaaagtctcccattattaatgtgtgagagtctaagtctctttgtaggtcactaaggacttgctttatgaatctgggtgctcctgtattgggtgcatatatatttaggatacttagctcttcttgttgaattgatccctttaccattatgtaatggccttctttgtctcttttgatctttgttggtttaaagtctgttttatcagagactagaattgtaacccctgccttttttttgttttccatttgcttggtagatcttcctccatccttttattttgagcctatgtgtgtctctgcatatgagatgggtttcctgaatacagcacactgatgggtcttgactctttatccaatttgccagtctgtgtcttttaattggagcatttagtccatttacatttaaagttaatattgttatgtgtgaattttatcctgtcattatgattttagctggttattttgctcgttagttgatgcagtttcttcctagtctcgatggtctttacattttggcatgattttgcagcggctggtaccggtcgttcctttccatgtttagtgcttccttcaggacctcttttagggcaggcctggtggtgacaaaatctctcggcatttgcttgtctgtaaaggattttatttctccttcacttatgaagcttagtttggctggatatgaaattctgggttgaaaattcttttctttatgaatgttgaatattggcccctactctcttctggcttgtaaagtttctgccgagagatctgctgttagtctgatgggcttccctttgagggtaacctgacctttctctctggctgcccttaacattttttccttcatttcaacttttttgaatctgacaattatgtgtcttggagttgctcttctcaaggagtatctttgtggcattctctgtatttcctgaatctgaatgttggcctgccttgctagactggggaggttctcctggataatatcctgcagagtgttttccaacttggttccattctccccgtcactttcaggtacaccaatcagacatagatttggtcttttcccatagtcccatatttcttggaggctttgctcgtttctttttattcttttttctctaaagttcccttctcacttcatttcattcatttcatcttccatcgctgataccctttcttccagttgatcgcattggctcctgaggtttctgcattcttcacgtagttctcgagccttagttttcagctccatcagctcctttaagcacttctctgtattggttattctagttatacattcttctaaatttttttcaaagttttcaacttctttgcctttggtttgaatgtcctcccatagcttggagtaatttgattgtctgaagccttcttctctcatctcatcaaagtcattctctgtccagctttgttccgttgctggtgaggaactgcgttcctttggaggaggagaggcgctctgctttttagtgtttccagtttttctgctctgtttttccccatctttgtggttttatctacttttggtgtttgatgatggtgatgtacagatgggtttttggtgtggatgtcctttctgttttttagttttccttctaagagacaggaccctcagctgcaggtctgttggagtacccggccgtgtgaggtgtcagtctgcccctgctggggggtgcctcccagttaggctgctcaggggtcaggggtcagggacccacttgaggaggcagtctgcccattctcagatctccagctgcgtgctgggagaaccactgctctcttcaaagctgtccaacagggacatttaagtctgcagaggttactgctgtctttttgtttgtctatgccctgcccccagaggtgaagcctatagaggcaggcaggcctccttgagctgtggtgggctccacccagttcgagcttcccagctgctttgtttacctaagcaagcctgggcaatggcaggtgcccctcccccagcctcgctgccaccttgcagtttgatctcagactgctgtgctagcaataagcaagactccatgggcgtaggaccctctgagccatgtgcgggatataatctcctggtgcgccgttttttaagcccgtcagaaaaacgcagtatttgggtgggagtgacccaattttccaggtgccgtctgtcacccctttctttgactaggaatgggaactccctgaccccttgcgcttcccgagtgaggcaatgcctcgccctgcttcggctcacacacggtgcgctgcacccactgacctgcgcccactgtctggcactccctagtgagatgagcccgctacctcagatggaaatgcagaaatcacccgtcttctgcttcgctcatgctgggagctgtagacctgagctgttcctattcggccatcttggctccagaaaaaaaaattgttaaattggacttcatcaaatttgaaatttttgtgctgcaaatgataccatcaagaaagtgaaaatctcacccacagaatgagagaaagtatttgcaaatcatatatctgataagggtattgaatttagaatatataaagaactcttgcaactcaatataaaaagacaacccaattttaaaatgggcaaagtatttgaatagaaatttcttgatagaagatatacaaatttaaaaatgctcaacatcattagtcattagggaaatgcagatcaaaaccaaattgagataccggtttacacctattaagatggctatagaataaaagaacaaataacaagtattggctttaatgtggaggagccagaacccttatatattgctggtaaaatgtaaagtcatgcagccctttgaaatacagtctgcaagtctttaaaaaattactatttgttatttggtttttcttcacttttaatttaggttcagaggtacatatgcaggtttgctatatagctaaattgtgtgtcacaggagtttagtgtacacattatttcatcacccaggtaataagcatggtacccaataggtagtttttctatcctcaccctcctcctaccctccaccatcaagtaggccctggtgcctcttgttcttttctttgtgttcatatgtactcaatatttagcttccacttatcagtgagaacatgtggtatttggttttctgttcctgctttagtttgcttaggatactggcctccagattcatccacgttgctgcaaaggacatgatctcattctttttgcatagtatactatggtgtacatgtatcaaaaatgttactgtttgacctagtaattctattccaaggtaaatactcaagagaaatgaaaacatgtccacacaaatacttgtacacaaatgttcattgcagcattatttataatagccaaagagtggacgacaaatgtcttccaaatgtgggctccaaatgtccaccaactgataaatggaaaaacaaaatgtggtatatccatgccatggtttatctgtcaataataagaaatgaagtactcatacatgctccaacatggatgaaccttgaaaacattatgctaggtgaaaaaagcaactcacaaaagactacactgtatgattttatttgtattaaatgtccataaaagaaaaatatttagagatagaaaggaaattagtttttccagggtctgggaggagacagtatgaggagtggctgctaatgggtacaggatttctttttggagtgatataattgctctaaaattagtttgcagtaatagatgtgagtatgctaaaatgggtgaattttatagtatgtgaaatataactcagtaagcccattaaaaacaacctaattaaattaaaaccaagctataacagaaatattatatggctttggcagtttagaatagtgggaaaatatggagtaagggtggggaaatagtcccaagtataattctggttttgtcactactagtgtatggacttggacaagtcatttgctttctctaagtatcagtttgcatatatgcaaaatagaggtaatgatacctacctcagtggtaccttttcaaaaccttgttcttcctcatctctcctctaccactttctcataatattattacagtaataaccatttattaagcactgtgtccgcagtggtgtggggctgctttacctccacaacttcactgaatcctcactgcagtcttgtgggatctttatttctttgcccattttacatgtaaataaattgaagtcaaatgagttgttcaaggtccttctgttagcaagtggcagagatggacatgaaaactagatcttctacctatgtgtctttccacttcaactaaagaatttattaaagagaattgaaaagctatgaactaaatttcggtaatacttttaatagtaaacattgctgccctcgtgaatgaacacacactaaatttcaaatctcacggtggcagggaataaagatgctacctatcttaagccattacttcaccaacttctccaccaaaatattccttgtaaccacaaataagtaagcacaatagatctataaggagagaataattgtgaactctgattttatcttaaaaagtcatgtagggatgtcatgttccacaatgtgattaataaaatatattttgttactaaacacaaggaaaaatattatgttccataaagatgtttggtggttgcctcgacctcttttagtttgaaaagtaggtatgtatgagaaagatatgtgtttacatgtttacccttgccttctctctgtctcttcccctctctctccctccctccccaacccctatgccctacacccccgcaacccccacatgtatttacctttctctaaaagctctgcatagccaagaaaagtgctcttttttatttttaggatattagatatttcattttcttatggtaagacaaaagattaaggcaaccaagacttacaatgtgcctaccatgtggcaggcacagaggcaagggcttttacatgttatttaatgtaattgtaattctcacaaaagccgtctagagttgaaaatatttccaactctaaatgaggcaaatggagcacagagagccttaattatttcacccaaagttcagtggtagaggcaggattccaacccaggtctggtgggctccaaatccttgttgggttgccattcctcttgctaacaaataaaactggtctgtgacttttgcatttcaccccgcttccacagtcactggtgggacttacttaagttaatcagattcttcaaagtatccccaagtcctcctttgaaaagaaagttgggggacaggaggaggagcagaggagaggagataaaaaggaaaggagtcagggagagagagagagagagagaaacctggtgatctcagctgggtgccaaggtttcctaagcccaagttccccatggttgagcctgtattgtcaggccaacagcttctagtaatccacttttatttaattaatagtgaaactgttgaagaattgcaagtggtgttctggttcagaaaccttccgttctatggggcactgcttttgcttcagattcataaaaccaaatgctctgcctcaagataataagtgaacgtgtaaccctcgggaggtaagaaaaaacacaatgtcacgtgcaaattctgcacttgttctcaaagcaaacctctcctgtgtttgcaattaggatgttatctaggagcatattcaaaacttttgaggtttttattttagtttttctttcattatgtgctgttttagtaatatcaaagaatacatgtaatatataatttatatgtcataacaataaaattaatgttgatgagcccagattaaagaatcaacaacattaacatcatgattgcatcaaccctattagaatggaagctctgtgaaggcatggatttttgtccattttgttcactgctatatccccaggacctagaggagtgtcagccacataataggagcttagtcaatattttaaaaataagagcataaatctacttatatcctctttcctcttaccatcactcccagcctcccctcagaggtaaccactatcctatatttgggctttattattcccttgcattttgataagttttcacatgtatattcccaaataatatattgcttgcttttgcttctttttaaactttatataatggaatcatattgtatgtatcctattgtgaattatgtcttttacacaacattagtatttgagattcaactatgtgtagctcgattccattccttttcattgctgattgtagtttattggatatgtgtgccataaattatttttctcctgtcagttaatgtttatcatttatgctttaataaacaaaactgctatgactgttcctgcatgtgcctcctagtacatatgtgaccaactttctctaggatataagcctgagagagggactgcagttggaatttacatttccaaagcccaaagtttagctcatgagtcagagctgcaatgtgccctttgtccacactaggtcaggatcagtgggagtgctacccaaaatattttgctagctggggagtcagggagaagcagagactgacctagtgaggccaggaggcactatctcaggtctctagtcaaaatgggttgcaattagtaaaagtccagattctgaatccccttcactatttatcttcctcttcctcctttacagttatttttgttcaaggtgcactttattaaactcatgcctaacaaacaaaactctaatgaatattttgtctttcattgattgtaaattcaattaattagattgcttgaaaaaattttaactgtattttcactttagtatggatgaaaatttcgatttctttaaaaaacattttttaataataacacaacataaagtctaccctcataacaaaatttaagggcacaacaccatattgttttttttttattttattattattatactttaagttttagggtacatgtgcacaacgtgcaggtttgttgcatatgtatacatgtgccatgttggtgtgctgcacccattaactcgtcatttagcattaggtatatctcctaatgctatccctcccccctccccccaccccacaacagtccccagtgtgtgatgttccccttcctgtgtccatgtgttctcaatgttcagttcccacctatgagtgagaacatgtggtgtttggttttttgtccttgccatagtttgctgaggatgatggtttccagcttcatccatgtccctacaaaggacatgaactcatccttttttatggctgcatagtattccacggtgtatatgtgccacattttcttaatccagtctatcattgttggacatttgggttggttccaagtctttgctattgtgaatagtgccgcaataaacatacgtgtgcatgacaacaccatattgttaactgtaggcacaatgttgtacagcagacgtctagaactttttcttcaggcttaactgaaactttatagccattgaacagcaacactccatttccgtttcttaaaggtcctttacaaaatgagctttctgcgtgtttccattttgtttatctgataacttttttttctttttttattatactttaagttctggggtacatgtgcagaatgtacaggtttgttacataggtacacacatgccagggtgtttggctgcacctatcaacctgtcatctacattagatatttctcctaatgctattccctcccttgcccctcacccctcactggccccagtgtgtgatgttccctagcctgtgtccaagtgttctcattgttcaactcccacttttgagtgagaacatgcagtgtttgattttcttttcttgtgttagtttgctgagaatgatggtttccagcttcatccatgtccctgcaaaggacatgaactcttccttttatatggctgcacaatattccatggtgtatatgtgccacaatttctttatccaatctatcattgatgggcatttcagttgttccaagtctttgctattgtgaatagtgccacagtagacataagtgtgcatgtgtctttatggtagaatgatttataatcctttgtttatatacccagtaatagaaatgcttggtcaaatggtatttctagttctagatccttgaggaattgccacactgtcttccacaatggttgaactaatttacactcccaccaacaatgtaaaagcgttcctatttcttcacatcctctccagcacctgttgtttcctgactttttaatgatcacgattctaactggcgtgagatggtatttcattgtggttttgatttgcatttctctaatgaccagtgatgatgagctttttttcatgtttgttgaccgcataaatgtcttcttttgagaagtgcctgttcatttccttcacccactttttgatggggttgtttgtctttttcttgtaaatttgtttaagttcattgcacattctggatattaattaacctttcgtcagatggatagactgcagaaattttctcccattctgtaggttgcttgttcactctgatgatcgtttcttttgctgtgcagaagctcttgagtttaattagatcacatttgtcaatcttggctcttgttgccattgcttttggtgttttagtcatgtagtctttgcccatgcctatgtcctgaatggtattgcctaggttttcttctagggttttcatggttttaggtcttacgtgactcatcttgatttaatttttgtgtaaggtgtaaggaaggggtccagtttcagttttctgcatatggctagctagttttcccaacaccatttattaaatagggaatcctttccccattgcttgtctttgtcaggtttgtcaaagattagatggttgtagatgtgtggtattatttctgagacctctgttctgttccattggtctatatatctgttttggtaccagtaccgtgctattttggttactgtagccttgtagtatagtttgaagtcaggtagcatgatgcctccagctttgtgcttttggcttagaattgccttggctatgcaggctctttattggttccatatgaaatttaaagtagtttttttataattctgcgaagaaagtcattggcagcttgatggggttagtattgaatctgtaaaacactttgggcagtttggccattttcatgataatgattcttcctatccatgagcatggaatggttttccatttatttttgtcttctcttatttccttgagcagtggtttgtaattctccttgaagaggtccttcacatcccttgtaagttggattcctacatattttattctgtttgtagcaattgtgaatgggagttcactcatgatttggctctctgtttgtctgttattggtgtataggaatgcttgtgattttcgcacactgattttgtatcctgagactttgctgaagttgcttgtcagcttaaggtgattttgggctgagagaatggggttttctgaatatacattcatgtcatctgcaaacagagacaatttgacttcctgttttcctatttgaatatcctttattgctttctctttcctgattgccctggccagaacttccaatactatgttgaataggggtggtgagagacggcatccttgtcttgttctggttttcaaagggagtgcttccagtttttgaccattcagtatgatattgggtgtgggtttgtcataaatagctcttattattttgagatatattccatcaatacctagtttattgagagtttgagcatgaagcagtgttgtattttgtcgaaggccttttctgcatctattgagataatcatatggttttgtcattggttctgttgatgtgatggattatgtttattgatttgtgtatgttgaaccagccttgcatcccaggggtgaagcggacttgatcgtggtggataagctttttgatgtgctgctggattgggtttgccagtatttttttattgaggatttttgcactgatgttcatcagggttattggcctgacgttttctttttttgttgtgtctctgccaggttttggtatcaggatgatgctggcccataaaatgagttagggaggattccttctttttctgttgtttggaatagtttcggaaggaatggtaccagctcctctttgtacatctggtagaattcatctgtgaatccttctggttctggactttttttggttggtaggctattaattacttcctcaatttcagaacttgttatagttctattcaggtatttgacttcctgctttaggcttgggagggtatatgcgttcaggaatttatctatttcttctagattttctattttatttgccccagaggtgtttatagtattctctgatggtaatttgtatttctgtgggatccgtggtgatatcccctttatcattttttattgcatctgtgattcttctctcttttcttctttagtagtctggctagtggtctatctacaaaatagactgtttatctgatatttattttgtaattatctaataataaccatcattatcatcatcagcattatcattatcatctcctttacccatacatacatttgtgtctttcaaataataatcccatctttgaagtgcatcctcatctttagcagtctgcactctgctttcttatatcatttattatcttattttataattatttatttccagtccttcttctctaacagatagtagtttcttagggccaaggaaatatctcgatcaccactatatccccagcacctaaccctgtgcctggtccatagggccagatgctaagagttgagttgaaccattgtacctaatcttaaccttcattagcacaacatggtttgtcagtggttaagaatctacactttggagtcagactcacccaggatggaatcctggcattgccacttattattaatagatgcgtgatcttgaacaagtttacttaattgttctgagcatcagtttcctcttctgcaatatagggatgatacacagctacctggtaggttgttgggaaaattaaatgggatgatatgtatgaaatggcctggcatatagagtgcctaaatacatgttcttctgattctatttggacagtttgtgttagtaacagaagtcaaaaaggtggagaaaggagaaaggtacttgtgaaaattttctatttcttctccatgtttcattcaggactgaggaagggggcacagtttttacccaaggaaatgacatttttagccaaaagaaatgatcttagcatttagctgaattatatattggaagtaagctccttccatgtggaacttatggccttgctagccttggtttgttggaagtgctcttgctggctttctagttagggtagggaaaggaaggcttgtggggaatgaagataggccatgatatcaagccactgggtttgcaaatcagtagaattttttattgctttctgttgtacttgggacttgaataaaggctgatatttgtgtcttgctggtaaagtgcttgtaaagtgagtgaaagttttctttgctcttgtcctgacatagctgttcacttggggttgaggggaggataacctttcatgttttttttttttcttcattctgatgactgtgctgaacattcaaaccaaaaggccattggtggaaagtaaaggtgagtggtgagaagacaatagggtaatggaaactgtgttggacttgtaatcaaattgtcctgcacttcccctctccaagtcttaacgtttttcatctgtacagtggatattaaaatgagaaaataagcttgtcttcacagagttttcgttaggtgttgacacaacaaacaggctcccattagggctcattttccttcattccttagtaaggaagaagtgcttataaaatatagcagttgtgctcttgtgaatgatagcatgggcagttgtcatctccctgaagcagatgtaacccagaatgtcacttgagttttgtttaatgcttaggcataagacataggaatgacaaaagctgacctttgggtagtgagaacaatgttccattttgttcaaacttgaattttttactataggagactgagaattaaccttccatgaaggttttaggattggctttctggcccttctccttcatatccacctgaaagagcttgggcgcagaagttcttgcagaaaggcagttagacaaggtgacttctgaagctccagtggccaagtattttgatggtagcctaaaagatgtccagaatcattgtacatcattttttcaacagaagcttcaggcatagggattatgcttggtactttatgttgtggaatggaatctggcggatgtccatgtgatctatagaaacacctaaggaaagtgaagaaatgagggaaaaaaaagaacaagacttttatgataatactaatcacgatccttgtgtatttattccaatggcattttatccattatctgatttatattaccactcacagcagcagctcaataggatgggagatattatctctattttatagatgagatttgaggctcacgaagctaaagcaaggaacatcaaatcactttgatatttggtctggttttgttataggtctccctttggatgaggtaaagttacaaacctgggttcatatcatttaattagtctgaaaatgttgcctggacaccaccttcagttagatatcttaacctcaggcttcctgccttcattgctcccgcatatagacatagactatgagattggctaatcccagagaacttccctaatcccttggcaagatccaaaaaggctcagtcacaccctacaaccatcatctttaggagaagtctcagaaaattcagcttcacactaactaacttgagcaatgaataatagtcatttatgcctgcaggttaatgctgaagacctgagacttcacttgcctatttctgccattcagtgacatgtgttgcattggttttttgtgtctttccagtttggagactgccagggaccatgttttgcccattgactattactttccaccccagaagacctgcctgatctgtggagatgaagcttctgggtgtcactatggagctctcacatgtggaagctgcaaggtcttcttcaaaagagccgctgaaggtaaagggtcttgcacatgcacttctctttccctttctcctttaccttccagagagagacactaacctttcagggcccaggattttatcatctcagaaatagagtcattggcaaggccctatcaaataacttaggagcctaaggaagcaaatttttgtacttgctagttccctggtttcagcagccttgtttgtacaggcaatttaggcagtgaaggtggtcccagctggggcttggggctcagtgggtcctagaaatgaaagaaaaattaatgatttgaaaagatttaatttcctcccttcttgttttctactctgctggctagtaaaggaaaaatttgtccttattagagaggttagaagtggagaaaccccaactgagtccccagcctgttccttgggatgaatatgagactgttccttagcaaaggcttcctggcctcggccccagaaagggagtgttctcactcttcagcagactatcagtctctgcacctgctccctcctgttgtggcctccttgggacctgtctttgcattaatagttcctaggtaggtaagaactcagagtgaagaaacacatttattctcctctccagagacctgatctcaaagcctgtccattagtccctaaccttaatctaaggtagcatcttatatctggctaaattggctcaagccctagctccttagttttatttagcttagaacaactcatgtctgctcaacctctagaggcgctcagcccacattctgcagtagaaactcccattttcaggcctcttatatacggtaatgtctccttcctctaaccacccagggcttaagcttcctgcttatccacttcaccctgtattgagggctttcttctcaaagagacattgatgaggagcccctagagagagatgctgtgctctgggaccagaccccttgttaaacaccagtattcacctctgccccaactttccccaaagaggtacttcctgccaaggcctttctctttcctctcactggctggaagtgttgagttccacttcagaaccagaacagagaacctttccttctataagagctataaaccttgagaacagtcttaaaacataggtatgtaggccacaccattcaccacgaatgtactgatactcatcagaatatggaagaagcaccagagagtttgaagcatctagagaaaaggtagaaagagaatgccctttaactgacctcctcagtgatagccaatcacaatgatgagtgttgattcatcattttggctaggtggcagaaatatctataaaacagaagctgccatgttgttttcttccagtcctcagggcctacaagaaggcagctatcatttggtattactgaaaacatgccccatgttcagctcatacccccaaattacccattgctactgtttatgctgggctaatatgaagcccagggccctaatgtctaggtctaggcagtaaggcctagagcagtgcctaaagagcctgagagcagtgccttcctttcttcagagtactcatgaaaggatggctgtcagaaaaggaaatgaggatgggttccagagacttcagaccaccccaacttccccagtgagaccctggcacctccccataccctctcacctagcgggccctgtctatagagcagagaatgaaacagagcactcatctagaggtagtgtgtcagcaagcccaggcactgcaccacagtaatagcagccatatcagatgggaaaggagttcaagtgaacaaacaagcaaattcaatagtcagatagattagattatacttgatgcttcctctgagttttacaaatatgggtcactaaattgttattttcagaaaacaggggaaatgctcaatcacattgtgaaagggaagattttgctgtcatatcatacatcccacatgggagctttctgcagaagttagagctgaaggagggaggcaggcagaagggcaactggcagggctgcctgggaggagctctgcaatgaggtggatcctgtgccatttgagaacagggaagaaaagaaatgaggttttggggagggaatcacccaactcacagaacacacagaaatccagcaaggtttcaaaacgctctacaccttagagtctgttaagttagggaaactctgtgagctcatagggccaaatgcacttgcctgcttgaaatatgaaaaatcagcaatggattccttgaaaaacaatgaaaagggaaccttctgagccccttggttattttgacatatggaccatagatttcagtcctgagccctttgaaggtaggagaaggtggtttagaaaacacacacacacacgcacacaaacacacaccagaatgaagcaaaaaaaaaattactggtgttttctttctcctcccatctgtgaagctgttggattgattttactgccatcattatccctgtttgaaggcagggggctgtcttattacccaaagaggacatttattgatttggttttctttttccatttttacaatgcatctttatcgcccatatggcctttctggaggtggttttcagtctggcttgttgaaacatcaaattatacctgtcttagagaaaatagaaacaaaaatctttctcttccttacttgcttgttgtagtcagttaactcggactgagtattcagagtcttgattatcacttaattcatagtttcataaatctctggaatgggcataggtacaggacttaaaagcctggcatctcagacagaaatatgtttttagctttggtggtttataacagatgggacttttaggctgtcattggtgcagggctcagcacagagtcagttgtaatctggacaggttttgttgttgaggaagagtgggaagagggagtcctacattttctccttgtcagtaatgttggagaattggggtgagggtgaggctgggcagggagggtctgcatagaaaaaagggtgcggtgagaaaaaataatgctactaagccatgagggtaaaatgaccaaattctggttgagagaaacttggtcaaagtgtgtatggggagagaaagttggtcaaagtctgtgtctgagtgcttggtgggatgaactctgggttagaaacaggcatggagggaaatagttggtttatggagtgggtaggatgagtggggtggtgaaagggaaggcattttggatgctaagagaccaggaagtcaaagcaaggcaatacacataaacagaggtaagggctcagagaggttttagttgtgtagacttggataagaaattttcccttttggacctcagttttccttgtttgtaaaacaacggacttgaactagatattttaaaatgtgcttccagcttagacattttgtgaccgttctacaaattacaaacataatcatcatcatttcagcaaactcacatgtatttatacctgcataagtttttggtcttgctttcctagaaggtgactaatcccagatcctaatcaattaaagaagcaatcttcagatggggatagagccagctgagagagtgtactatggatggagtgagttaaaactcaggactcagattttctccttgtgatcattgctgggtaacttcctttcttttctattttctcatctggaaaatcaggatatgaatccccatctctacctcattatgtttcaaagagggttaattaatccatcatgtgcattatgtgctcaagaatttactatttttcagacattttctagtaaaacattgaagattatatgtccatttgttttgtacacatggagtgctgtttggtacacatcataaaattgaaactgtagtttacattctgaactcaaagaattacaccatcctcactgatgtttacaataggtcccaatttagtttctttagcaaattttatgtaagtatggctttgattctctctctcactccaggtttttgttagggaagaaatgcaagtgaaccctcattgaactctttctgtcctttaaatccattctttcccacctcaactcatgtggaattgaatgttgcctctagtttggagtctagcagagagtttttggtgcatatcagtgtccccttcactccctgacttttcaagtaacatttcccagaggcaaattaactctgctaagaggatctgcttgcagcttcaacagagccttcatcaggtatctttggccaaggagttgactgatcctgactttgcgagtcctagagatcttttcacaaagctcctctcatgtttctgcctctgattttcttaaatgtcacagacagactttagatttaggggttggttaactttttttgtaaagggccatgtagtaaatattttaggctttgtagatcatatggtctctgtgtcaactactcaactctgcctttgtaggatgaaagcagccatagacaatactggaactaatgggagtagctgtgttccaataaaactttatgggcactgaaatttgaatttcacttaattttcacatgtcgtttaatattatttttcttttttaccatttaaaaatttagaaatcattcttagctctttgggcctcacaaaaacagatggtagagtggatttggtttatgggctgcagtttgttgacctgtgctttagctaatcacttctgtacttataaatctgcataggttttatgtttttccatctcttggtatcttagtaggccagtcaaagtttgaacaacttgttagcacagaatacctggcctagtggcttcttggtcctgagcttatttactaaacaagagaaaaaataaataagtctagaaatgctagaagaggatacttttttgttttaatgatctagtagatcactcctccttgcaatacccagaggagaaactgaaaatatttcaaacattttctagacttctgtgttgtaaatttgtggataactatgaactatatatgaatgaacttttctggatgacacatatattccagatggtaaaaaggaagggctttggggactctctggtaccaagtgtcatggaaaaactgtgtgtctcatagaaagtagatcccaggaggccagcagagttgtggatctgccatatattacctcatgattctgtcttcgcacactcaccggcttaattctgggcctccccataacacgactagaccacaggcttgcagaagaaataatttagctctgtaactcattgaagttggtgcccacccaagtctctgtcagtgcccaattcgggagccatgccaagaatttgccattgctgcttcatggtggccttgtgcctgcttatttatagcctgtgcattttatgaaacagggattaataagaagttgccatagcacttgcaccattatgtaaatatctgtaatgcttacataacttttgtcacttgcaagaccttttgagtccattgccttctgctaccatgccttaccaatttcctagtcccttattattatttttcaattcattatatttaacttctgtgatacacgttcagaatatgcaggtttcttatataggtatacacgtgccgtggtggtgtgctgcaaccaacaacccgtcatctacattaggtatttctcctaatgctatccctccactagcccaccaccccctaataagccccagtgtgtgatgttcccctccctgtgtccatgtgttctcattgttcaactcccacttatgagtgagaacatgcagtgtttggttttctgttcctgtgtttgttttctgagaatgatggtttccagcttcatccgtgtccctgcaaaggacatgaactcatccttttttatgactgcatagtattccatggtgtatatgtgccacattttctttatccagtatatcattgatgggcatttcggttggttccaagtctgtgctattgtgaatagtgctgcaataaacatacgtatgcatgcgtctttatagaagaatgacttataatcctttgggtatatacccagtaatgggatggctgggtcaaatggcatttcaggttctagatccttgaggaatctccacactgtcttccacaatggttgaactgatttacacccccaccaacaatgtaaaagtgttcctatttctccatattctctccagcatctgttgtttcctgactttttaatgatcgccattctaactggcattgacatggtatctcactgtggttttgatttgcatttccctaatgaccagtgatgataagctttttttcatatgtttgttggccgcataaatgtcttcttttgagaagtgtctgttcatatccttcacccactttctggtgtggttggttatttttttcttgtaaatttgtttaagttccttgtagattctggatattagccctttgtcagatggatagattgcgaaaattttctctcattctgtaggttggttgttcactctgatgatagtttcttttgctgtgcagaagctctttagtttaattagatttcatttgtcaattttggcttttgttgccattgcttttggtgttttagccatgaagactttgcccattcacaattgctacaaagagaataaaatacctaggaatacaactcacaagggatgtgaaggacctcttcaaggagaactacaaaccactgctcaaggcaataagagaggacacaaacaaaaggagaaacattccatgctcatggataggaacaatcaatatcgtgaaaattgccatactgcccaaagtaaattatagattcaatgctatccccattaagctaccattgactttcttcacagaattagaaaatactactttaaatttcatatggaaccaaaaagagcccatatacccaagacaattctaagcaaaaagaataaagctggaggtatcaagctacctgacttcaaactatactacaaggctacagtaacccttatcaattttttatgtgcctctccatattctgcagtcagaagcttcttcagtcctttcagggaattgctgggtgactatcaaactctggtagttcatttttgcagttggctgctgttgtgaggataagagttagactcactttctcttcagagatagaaattatgtattaattctctgggttctagacccacagcaaggagcatactgctcctcaaaataactgaattctgcgagaagccatcattgtaaaacaacaatatcttcagttatagtagccatgtgtgcaacttctggaaactgttattcagattttcatgttccttccctgtctcttcatagctaggcagctgctttcagccttgtacagatgctagtgagctttctacctacaaacctgcagaaaattgaactgagatttggaggtgaaagactcttgataaagggaacaaggtttagaattctcagtccctttgctcccaggctgtgttgtgactactgaggcactccagtgaaatcactattcctcctatctagactaatgcctgtctctgcagagcacctcataagaacaggcctggtagtaatatcctcatgcattcagtcagtaaatatttacagagtgcttactacatatagggtattgggctgacatatgcaagatacagggcctgcttccaggaggttatagcttattgatcataaatgtggcattttttttttttgagacggagtcttgctctgtctgtcacccaggctggagtgcagtggcacgatctcggctcactgcaacctccacctcccaggttcatgtgattttcctgcctcaccctcctgagcagctgagactacaggggctcatcaccacacccagcttttttttttttttctgtatttttagtagagacagggtttcaccatattggccaggctggtctcgaactcctgacctcgtgatccacccacctcagcctcccaaagtgctgggattacaggcgtgaaaatgtggcaatctttaaagctcttcagtggatgaaaggccaccctatctgctgtccttttgaacttcgcaactttcttggtacagagtgagaggttattctcttggttttccatataagtaaactgaggctttgccagttcatcaacaggtagtaaataatatatttggaatttgaacccaagtcttctggggtcaaaggcagcattcactctgctctgtcacagcagctcctcaaataagccaacatagaaaccaagtactatgcctaggcaacaagaaaggcagcaatgaagagcaacagcagagtcaaatatgagagaaggaagttaagaaagatgttaagtactgtggggagtaactgagaaaccaccaagtatcgctaacatcacagggaacttgtcttcctaagaaaattccaagcacttaaaaccgctggtagttcatcagcaactctcttcattagatgtgcgagggacatgtgggccatagtccttctactaacttatattcttcaggggaaagttctgattctgatgagacccagcatggtagctcttaattcactgttgtcacacgactatagaacaggaagcacaacttaacacctgtgctcatgagaattttgctccttatgaccaagctaaagaaagagcttagacaggatgtgtggctataaatgtagattaatggttccttggctctttggtttgagccttctcagcagagcatcccacggagtgttttccatggggccacgagcaagagaaatccacttccctcctcctcaatgtcagaaaatagagaatattgtctttcaggatagaattaaaaagtcatagaggcagcaacttgttttcctatattagggttttaaaattctgtttttccttcctctcctgggtcagatcattgtgtggatggaccttgatttcattgtggtatctgtatgtggaccctgaagaccatggacttctaacaattccttaagttacataagcacattcctacaggtcacaagctcatttacttacaggatggttgatttggtcacaggttatttcatgaaaatacttaaaagatttgcagtgttcaaaactgcagtatctttaaacactaaaacttgaaggaagggaatttagaaatcaaaaaatctggtcaaaccatttcatggaaaaggaaagtgaggctcagagagaggaaattactttcctgggtttgtatagcctataaatggcagaaatgagagcctccctgccatttctagttttctgtctgagagactctcctgcctaatagctaattagcagagtcacagaggtcattaccttgcaattctcaagaattatgtgaggcagcatagtaagcatttatggcccttggttcctagaaggagcttagtccctgatagtcatctctgcctttgccattgtgtgagactgtcttctgtaactgtatgtcttcctccctagtaagttaatgagtaataaaggtattctatagtgagaggactctgtaagacatttcttggtgtgaggattgttccaaggttgttttgtgtgtatgtgcatgtataaacttttttagggagcatattcatagcttttacatggatctcagaggctctataacccagagaagattacagaataccagtcttgtctttggtaaggattttatagacccatcctgactacagtgatatccaacatggctatgtaatgactggcactttccccacataacatatatttattccacactcagtgcctactgtgtacatgagacctataccgggcactgggataagagacatgaaataacagctaaaattgtttattgagcagtcagtatgcattagatgctttgtagtcattttcttattcaatctgtataccctcaatttacaaatgaggaaactgaggcacagaagagttgagtgatttgcccaaagtcatacaaatagtcagtggctatgtgatgaatagttaccaacataaaagagtgagattactgctgtactaaaagtaggtacataatcccctgagcagacagtatgagagaatgatttattttacctggaaagtttaggaaggcttcacagaggagttaagggttgatctgggtcttgagggatggataagagtttgccagatacaaaaaggtaggaagagaacttcaggaggagggaacaggctgagcaaagacacggcgatgtgaaagtgggaggcttgtttggggaacattatggaatctggaggttattgtggggaatctcatcagatgcagcaagctgtttgacaggccttcagttggctctttgtaccttgctccctccgcatgctgagctgtccatagctgccctaggctggtgtctgggattttcggaagaaggttactatccaggtagtgtaacaagatgcagtgcaaaagcaccagattggggctctggctctgctgctgacttaccacctggccttaagcatgtctagttccctctttgtacattaaaatctccattggaacagtaacatggttgtattaaatgatcttgaagattttacctgcacgttttgcacatgtaccctaaaacttaaagtataataaaaaaattaaaataaaaaataaaaatataacaatataaatctttaacaataattttagtagtaaatctctacaattttacagataatccagatgcatccattggccaatggttcactttgtatgcataatatttgggaaacaggcagacccaatttcaatccttagttgtaagacttaatacatatgtgatctcgagcaaatcacttttgtatgcctctataaggataataatagctcacagaattattttaagaactaaatgatgtgtaataaagctactggtactcagtaagttttgtatccttttcctagagtgagtcttggtcataggcatgcgtatacttgcagcgtccctgggtaggccgaaagagcaaataagagatggtatctatggtattccccaggtaaaggaggccttgggttggcataagatttcacttctctttagagttacttaattagggaccagaaaggccatcagcatttgtatgagaatataacaaaggtcaatctcttcctctttactttttacctcccagtacactgtgagtaacattccccagccagcccagccagcacgtgttcattgcctctcttgacttccagactttggacttgaaggtgtcagagctctctgtgtatctttgtccccaacaagataagtctgacctccccagcaaattcaagtcctaagccactgtccaggagaaaagctagcaaggtcataaattattctccatattttccagccattggtttcccttgtccagccagaggtgtgtctcaaagtatgctgaggccagattcaatagaaacctgagccagcacctgtgtaaataatttttaaagctccttttcctgaagctggatgaatatttttaaaaactaagctggattgtcttttatctagcatgccgtctcctacattcctagtgctatggacctcttggaggaatgtggtttggttatagtggtattgtcttgtctgttgtgggggagggagacatttctttcagaagcaaggtaatactttggtctggtctatgactctattttgtttaaaatgaaactatggcagtatagtggtattcattctgcttcccataggttaactttacatccctctgtcttcacccactcttcagttctgattcttttaaaagcagccaaccaaaaccagcaagtacatactgcttatctctgacttccaccagaatcaacttcagatcttgtccaaagctccatctgaagagaggggaataacacccagccaagagccctcagggcccatcagtaagtagacatcctgtccttgaggttccttaactctgctcagcttcagaatacagaaggggttggttcttcatttgtgttgtttataactaaaagcctcctactccccacttttttgcatagcttcttctgccatcccacctgtgtagcctcttcaactcccccaaaactcctctgtagcccatgtcacttggaaagagttttctttgtctcttttgcaacttgacaatgactagccagcaagtttaagttcaaattattgttccatgggagcagagatagatataggaaacaaaaaaaagggatatggaggtatagagtgatttcccacctacctagtgagcactactgagatattcaagtactctctacccaagaattctattgatataaaggtaaaaaacttgatcttaggtctaatatccgttagtagtgtgaccttgggaaaatgataccacccccaaaggcttagttttcttaactgtaaaataggcatacagatgaccacccccagaggattcataaggataacatgagataaggcaacttgaaatttcctagcatagtgatagactttcgaaaataaaatgaatcaaacactgataacagtacttcctagtacacaaatgagaaatcagtccctcatcaaattacagcacattttcaatgctccaattatgtcactgtagaaatgctaatgtggattaaataatttgtctgttgctatttatacggataatttgatagtagttatttttggacatggatagctttgaagccttacagatgagtccatccccaagtacccaaaactaaagaaagttggctagagtgatgacaaggtggcagcacagagctccctgcgttctgggccctgtcccctagctagagagaactccaggctataagcatttgtattctcatagtccaatggcagggaagaagggctggaggtgagtagttttcactcatttattttttcaacaagcatgtatggtatcaggccttgtatgcatccagagacaaatgtgaactagccgtgtcctcaaggagattccagtctggtgggcctgccttccaaggtcagttgcagctttagcactataaagagcacctacctgcggcagatacaatgtgatgggacatgacagagaaaaaatctataagcagagcctccccattcccaggcattgaaacaatcctaaccaagactggcatagtacaatgagcctgtccctatcagcaggtttggaagccttaacaacaacaacaaaaacaataataatggtgatgataatcatagagcctaatgttaccaaacattttccatgtgttaagtactatactaagtgcatacttaatcctcacaacaatgctataagatagtagatactcttactactaccctgattttacaaatgtggaaactgaggcacagaagactaagagaacaggaatacacctaattcacctcagttcaacaaacatcaagcatctgttttatgtcaggcctcgtgctggatggcagggagagagagatgagtaaagcatagtttcagtccagtgggagcaaatgacagcacacagtggggcaggtatattgcagcccttctgcttgatgctaagaactcagtgtcagtgatgaatgaaacacagtcattctctcaaagatcttaaagcttagtaggagatatctgtgtggaaacaaaaattaaatactgctgtgataagtgtcataagagataagtggaaaatgagagagagagatcactgtagcaattgattggtttaaatcaaagcccccaaaaaaatgttattgagaattataaaacaactaattgatttaaatcaaagcccaaacagaagtgtttgctaattttatttcaatttggttgataatttggttgaaatgaatttatttcattttttattccatccttacaatggaagattagtgcttgtttcccacccaaggataccaggatatttcaggggctgtattacaatatagttaaattattcctttatctcaaagcacatccacactttcccctatccttacctttactcagggtatctcttctgcctcaggtgctttttctccacatttccatattcttaagtcctaccttccttcagggcctcactcaaatgcctcctcctccatgaagcattcacccgactgaaaggtaccccgccctctcctgtactccacatcacttcatgggtgtctccacttcctgctttatctttcagtaatacacttacagttctctttcctccactagactgagctcttcagaggaagactcacttggctgaaaccatgattttactttaaacacattgaaaacctctactggagtgcattgtgtctggtgggcttcaaccttaattcttaagtatgtgaaaacacatcacctatctggaggtttacactttctgctaatgactttatttttaagcccaccaccctaacacaacaaatacttaaaacttgtcttcatttcctttaggtctggccctcatgcatgcatataatttatagagtcactgttttgctcggttgtcctcatgcctctatattattggaggtttagattgtttccatatactcaggttgtattcatgtcctttttttctttttaaatttccttagcatccatttccaccattggaaattcagggtcaaaacaggggtttgggattggagcatgtctatcacagataaccaatcatgtgttatgacttaagaatttatgaaagggccctctacctgaagatatcttgctactgatgctgtctcacagtgtctgaaactcccatcatatgtggaattgttttggaaggctttgcctcctgggacacattcagccataatcaagaaatagtattgagcattagactgtcagtatgtccattagcaagactgtggaggaatggaatcaccaatattatattttataggggatacagaatacaagagaagttctgaagagaaaattcttatgtagaataggaaggcttagatacagcatgaaagctgcaggctttgaggagccagaggtcaaatgaaagcattgagtatttgtttagatgaaagaacagaaagggaaaaagaagcagaggaagggatagtagagagaaatgtataagttttatccatttaacttgtaattgtgtttggctatgggcacaatagaagcagtgagatcactttattttattttattctttatagacagggtcttgctatgttgcccaggctgcagtgtgcagctcttcacaagtgtgatcatagcgtactacaccctcaaactcctggactcaagcaatcctcccatctcagcctcctgagtagctgggactacaagtgcacaccaccacgcccagtgagatcacttgaaactagggagagatgtgtgagttctgggcaaccagtagttggctttacatagaactgtaggggtcaaggccaaaggggacgtcctgttccaagtcaccttctttggacattagaaaaccacgaggggtttggaaatcagaaaaccagcagaggcaggaaaactcagggcagcatgggagattcagtatatacaaaaaggttcacaccagtaatcaaacagaattttaactgctgatgtggagtagaggcagctttgtctgctgtgtgataaccaaacctttacgaatagtaggtgtatatggggaattggagggagataggtggctgtgtttagtaattggttgacttcactgagatggtttggggattgtggcttccagatgatcagattttcttttttaggtagagactccaacatcattacagaactataaattacatgtggaaaagaaaggcctcctatgttagaatagaaaataaaatgctgtggggttgagggacagaggtgctgtctaggaagtcagatagcgttttccagttctgtccctcagagttccttgtcctcattgagactcaatttctcttacttttttttttatactttaagttttagggtacatgtgcacaacatgcaggtttgttacatatgtatacatgtgccatgttggtgtgctgcacccattaactcatcatttaacattaggtatatctcctaatgctatccttcccctctcccctctccccaccacaggccctagtgtgtgatgttccccttcctgtgtccatgtgttctcattgttcaattctcacctgtgagtgagaacatgcggtgtttggttttttgtccttgtgatagtttgctgagaatgatggtttccagcttcatccatgtccctacaaaggacatgaactcttcattttttatggctgcgtagtattccatggtatatatgtgccacattttcttaatccagtttatcattgatggacatttgggttggttccaaggctttgctattgtgaatagtgccatgataaacatacgtgtgcatgtgtctttatagcagcatgatttataatccttagggtatatacccagtaatgggatggctgggtcaaatggtatttctagttctagatccctgaggaatcgccacactgacttccacaatggttcaactagtttacagtcccaccaacagtgtaaaagggttcctatttctccacgtcctctccagcacctgttgtttcctgactttttaatgatcaccattctaattggtgtgagatggtatctcgtggttttgatttgcatttctctgatggccagtgatgatgagcattttttcatgtgtctgttggctgtgtaaatgtcttctttgagacgtgtctgttcatatcctttgcccactttttgatagggttgtttgtttttttcttgtaaatttgtttgagttctttgtagattctggatattaccctttgtcagatgagtagattgcaaaagttttctcccattctgtaggttgcctgttcactctgatggtagtttcttttgctatgcagaagttctttagttgaattagatcccatttgtcaattttggcttttgttgccattgcttttggtgttttagacatgaagtccttgcccatgcctatgtcctgaatggtattgcgtaggttttcttctagggtttttatggttttaggtctaacatgtaagtctttaatccatcttgaattaattttagtataaggtgtaaggaagggatccagtttcagctgtctacatatggctagccagttttcccaacaccatttattaaatagggaatcctttccccatttcttgtttttgtcaggtttgtcaaagatcagatggttgtatatatgcggcattatttctcagggctctgttctgttccattggtctatatctctgttttggtaccagtaccatgctgttttggctactgtagccttgtagtatagtttgaagtcagatagcgtgatgcctccagctctgttcttttggcttagggttgacttggcgattcaggctcttttttggttccatatgaactttaaagtagttttttccatttctgtgaagaaagtcatgggtagcttgatgaggatggcattgaatctataaattaccttgggcagtatggccattttcacaatattgattcttcctacccatgagcatggaatgttcttccatttgtttgtatcttcttttatttcattgagcagtggtttgtagttctccttgaagaggtccttcaagtcccttgtaagttggattcctaggtattttattctcttagaagcaattgcaaatgggagttcactcatgatttggctctctgttttctgttattggtgcataagaatgcttgtgatttttgcacattgattttgtatcctgagactttgctgaagttgcttatcagcttaaggagattttgggttgagacgatggggttttctaggtatacaatcatgtcatctgcaaacagagacaatttgacttcctcttttcctaattgaatgccctttatttccttctcctgcctgattgccctggccagaacttccaacagtatgttgaataggagtggtgagagagggcatccctgtcttgtgccagttttcaaagggaatgcttccagtttttgcccattcagtatgatattggctgtgggtttgtcatagatagctcttattattttgagatacgtcccatcaataactaatttattgagagtttttagcatgaagcgctgttgaattttgttaaaggccttttctgcatctattgagataatcatgtggtttttgtcgttggttctgtttatatgctggattatgtttattgatttgcgtatattgaaccagccttgcatcccagggatgaagcccacttgatcatagtggatacgctttttgctggtattttattgaggatttttgcatcaatgtttatcagggatatcggtctaaaattctcttttttgttgtgtctctgcctggctttggtatcaggatgatgttggcctcctaaaatgagttagggaggattccctctttttctatttattggaatagtttcagaaggaagggtaccagctcctccttgtacctctggtaggattcagctgtgaatccatctggttctggactttttttgattggtaagctattagttatatcctcaatttcagagcctgttattggtctattcagagattcaacttcttcctggtttagtcttgggatggtgtatgtgtcgaggaatttatccatttcttctagattttctagtttatttgcatacaggtgtttatagtatgctctgatggtagtttgtacttctgtgggatcggtgattatatcccctttatcattttttattgcgtctatttgattcttctcccttttcttctttattagtcttgctagtggtctatcaattttgttgatcttttcaaaaaaccagttcctggattcattgattttttgaagggttttttacatctctatttccttcagttctgctctgatcttagttatttcttgccttctgctagcttttgaatgtgtttgcccttgcttctctagttcttttaattgtgatgttagggtttcaattttggatctttcctgctttctcttgtgggcatttagtgctataaatttccctctccacactgctttgaatgtgtcccagagattctggtatgttgtgtctttgttctcattggtttcaaagaacatctttatttctgccttcatttcattatgtacctagtagtcattaaggagtaggttgttcagtttccatgtagttgagcggttttgagtgagtttcttaatcctgagttctagtttgattgcactgtagtctgagagacagtttgttataatttctgttcttttacatttgctgaggagtgctttacttccaactatgtggtcaattttggaataggtgtggtgtggtgctgaaaagaatgtatattctgttgatttggggtggagagttctgtagatgtctgttaggtctgcttgacagtggagtgttaaagtctcccattattattgtgtgggagtctaagtctctttgtaggtctctaaggacttgctttatgaatctgggtgctcctgtattggttgcatatatatttaggatagttagctcttcttgttgaattgatccctttaccattatgtaatggccttctttgtctcttttgatctttgttggtttaaagtctgttttatctgagactaggattgcaatccctgcctttttgtgttttccgtttgcttgataaatcttcttccatccctttattttgagcctatgtgtgtctctgcatgttagacgggtttcctgaatacagcacactgatgggtcttgtctctttatccaatttgccagtctgtgtcttttaattggagcatttagcccatttacatttaaggttaatattgttatgtgtgaatttgatcctgtcattatgatgttagctggttattttgctcgttagttgatgcagtttcttcctagcctcgacggtctttacaatttggtatgtttttgcagtggctggtaccggttgttcctttccatgtttagtgcttccttcaggagctcctgcagtgcaggcctggtggtgacaaaatttctcagcatttgcttgtctgtaaaggattttatttctccttcacctatgaaggttagtttggctggatatgaaattctggttttaaaattcttttctttaagaatgttgaatattggcccccactctcttctggcttgtagagtttctgctgagagatcagctcttaatctgatgggcttccctttgtggggaacctgacctgtttctctggctgcctttaacattttttccttcatttcaactttggtgaatctgacaattatgtgtcttggagttgctcttctcaaggagtatctttgtggtgttctctgtatttcctgaatttgaatattggcctgccttgctagattggggaagttgtcctggataatatcctacagagtgttttccaacttggttccattctccccatcactttcaggtacaccaatcagacatagatttggtcttttcacatagtcccatatttcttggaggctttgttcatttctttttattctttttcctctgaacttctcgcttcatttcattcatttgatcttcaatcactgataccctttcttccagttgatctaatcggctactgaggcttgtgcatttgtcacgtagttctcgtgctgtgtttttcagctccatcaggtcctttaaggacttctctgcattggttattctagttagccatttgtctaattttttttcaaggtttttaacttctttgccatgcgttcgaacttcctcctttagctcagagtagtttgattgtctgaagccttcttctctcaactcgtcaaagtcattctccatccagctttgttccattgctggtgaggagctgcattcctttggaggaagaaaggcactctgatttttagagtttccggtttttctgctctgttttttccccatctttgtggttttatctccctttggtctttgaagatggtgatgtacagatgagcgtttggtgtggatgtcctttctgtttgttagttttccttctgtcaggaccctcagctgcaggtctgttggagtttgctgcaggtccactccagaccctgtttgcctggttatcagcagcagaggctgcagaacagtggatattggtgaacagaaaatgttgctggttgatcattcctctggaagttttgtctcagaggaatacccggatgtgtgaggtgtcagtctgcccctacttgggggtgcctcccagttaggctactcggggttcagggaaccacttgaggaggcagtctgtccgttctcagatctccagctgcatactgggagaaccactactctcttcaaagctgtcagacagggacatttaagtctgcagaggtttctgctgccttttgttcggctatgccctgcccccagaggtggagtctacagaggcaggcaggcctccttgagctgtggtgggctccacccagttcgagcttcccagctgctttgtttacctactcaagcttcagcaatggcgggcacccctcccccagcctcgctgctgccttgcagtttggtctcagactgctatactagcaatgagcgaggctctgtgggcgtaggaccctctgagccaggcacaggatataatctcctggtgtgccgtttgtgaagaccattgaaaaagtgcagtattatggtgggagtgacccgattttccaggtgccatctgtcacccctttctttgactaggaaagggaattctctgatcccttgtgcttcctgggtgaggcgatgtctcgccctgctttggctcatgctcggtgcgctgcacccactgtcctgcacccaccatttgacactcccctgtgagatgaacccggtacctcagttggaaatgcagaaatcacccatcttctgtgttgctcacgctgggagctgtagactggagctgttcctattcggccatcttcacaaaaatcttactttggtttctagtgttaccacccactgttctttctcatctcaaccctgagtataagtacagatcacattccttgggttcttagaaaataatagaaatgaactctcattcatcaaaatgcccattagtaaatactgagggagaacaaactagaaatccagtatagaaaataaaaataggattatattccttggaatctcagaaaaaaacaatgaagagctttctttgggcattagacactttcccataaggtggctgactctcttttagtcatgtcagcttggcccaatcttcacttggtagcccttctttcttcttcattaatccatctcctatgctcctatggggtcctagagaaatgcccatcatgtacacacacatctaataacacaaagatcactctcgactagcaagcccttttatgatggtgtgagcatttgacacccttgttgctagtaacatcagtgagtgacctgacccatttttggaacagaatatgatcagtatgttgcctcaaggaggccctcactgttctaggaaatataattccagagtttgctgactcacaccatggaatatatgcataaaatggatcctgcagataagcctttctctgactagtttcagacatttttttctgggtaattttaaagttattttttatttttgtgggtacaaagtaggtgtatatatgtatgaggtacctgaggcattttgatacaagcatacagtgtataataatcaccagagttaatggggtatccctcaccacaagcatttatcctttctttgtgatacaaacaatccaattatattcttttagttattttaagatgtataataaattattgttgactgcagtcaccctgttgagctatcaaatactagatcttattcattctaactatacttttgtacccagtagccatcccacttcctcccctcccactacccttcccagcctctgataaccatcattccactctctatctctatgagctcaattgttttaagttttagctcccacaaatatgtgagaaaatgccaagtttgtctttctgtgcctggcttatttcacataatataatgtcctctagttccatccatgttattgcaaatgacaggatctctttcttttttatggcttaatagtactttattgtatgtatgtaccacattttcttcatccatttgtctgttgatagacaagagttgcttccaaatattgactattgtgaatagtgctgcaataaacgtgggaatgcagatctctttgatatactgattttctttctttagggtgtatacccagcagtgggattgctgggtcatatgatagctctatttttagtattttgtggaacctcaaatctattctacataatggttttactgacttacatatccaccaacagtgtatgaggatactcttttctccacatcctcaccagcattcattactgcctgttctttggatgaaagccattttaactgtggtgaaatgagatctcattgttgttttgatgtgcacttctctgatgatcagtgaggttgaggaccttgtcatatatctgtttgtcatttgtatgttttattttgagagatgtctacccagatcttttgcccattttttaatcagattgttagattttttttttcctacagagtgcttgagctctttatatgccctagttactagtccctggtcagatgggtagtttgcaaatagttgctctcattctgtgggttgtctcttcactttgttgatcgaatcacttgctgtgcagaaggtttttaacttgatgtgacctcatttgtccatttttagttgcctgtgctggtgcggtattactcaagaaatttttgcccagattaatgttctggagagtttccccaatgttttcttgaagtagtttcatggattgatgtcttagatttaagtctttaatatgttttgattttatttttgtatttgctgagagatagggctctagtttccttctgcatatggatatccagtttttctagcaccttttgttaaagagactattcattctctaatatacgttcttggcacctttgttgaaaataagttcactgtagatgtatggacttgtttctgggttctctgttctgttccattggtctatgtgtctgcttttatgtgaataccatgttgttttggttgcaaaagctctgtagtataatttgaaatcaggtaatgtgattcttccagttttgctctgttctttttcctcaagatagctttgcctatcctgggtctcttgtggttctatataaattttaggattattttttctatttatgtcaagaatgtcattgatattttgatataaattgcgttgaatctgtagatagcttcaggtagtgtggacattttaacaatatcaattcttgaaatccacgaacatggaatatccttctattatttggatgtcttcttcaatttcttatattaatttttttttagttttcattgtagagatatttcatttatttgactaagtttattgctaggtattttattttatttttacctattgacaatgggattgctttcttgatttcttttttagattgttcactgttggcatacagaaatgctactgatttttatgtgatgattttgtatcccgcaactttactgaatttgtttatcagttctaataggcttttggtgcagactttaggcttttccaaatataagatcatattatctgcaaacaagaataatttgacttctttcttttcaatttggatgcctttcatttctttctcttgtctgattgctctaactaggacttccagtactctgttgaataacagtggggaaagttaacatccttgttttgtttcagatcttatagccaaggccttcagtttttctgaatttagtatgatactagctatgggtctgtcatatatggcttttattatgttgaagtatgttccctagttttttgaaggtttttatattttaaggaagataaaaattgaactttatcaaatgcttttcatgcaacaattgaaatgatcaagtgctttttgtctttcattctgttgatacgatgtatcacactgattgacttgtgtatttagaaccatccttgcatcccgtggtaaatcccacttagtcatggtgaatgaactttttaatgtgttgttgaattcagtttgctagtattttgttggggatttttgcatcagtgtttatcagggatattggcctatagttttccttttttttatgtgtcttttgggttttgttatcagggtaatactggccttgtagaatgagtttggaatgattctctcctctattttttgaaatactttgaataggattgatgttacttctttaaatgtttggtaaaattctgcactgaagccattgggtcctgggctttttactgctggggagacttttcattacagcttcaatcttattacttgttattggtctgttcaggctttagatttttttcatgaatcaatcttcacaagttgtctgtttctcaaaatttatcaatttcttctaggttttccaatgtattgtcatccagttgctcataatgccctctaatgatgccttgaatttttgcagtaaccactgtaatgtttccttttttaatctctgattttatttgagctttctctttttttcttagtctagctaaatatttgtcaatgttgtttgttcatccacaaaaccaacttttcatttcactgatcttttgtattattttttccttttaattttatttatttctattctgatatttatcatttcatttcttccagttatttgagtttggtttgctcttgcttttccagttctttaagatgcattgttaggttatttatttgaacttttttgatataggtgcatattgctataaactttcaccataatattgcttttgctgtatcccataggttttagtatgttgtttagtatgtttccaatttggtacatttcaataaatttttaaattttcttctttatttattgacatagtcattccagagtatactgtttaatttccatgtggtttgtatagtttccaaaattcctcttgttattgatttctagttttattccattgtggtcagagaagaagcttgatatgaatgcaattgttaataatttttttaaaacttgttttgtgacctaagatatgatctgtcattgagaatgatccatatgctgaggaaagaatgtatattctgcagccattggataaaattgtctttaaatatctattaggtccatttaagacataatgcagattaaagccgatgtttcattgttcatttttctgtctggatgatctcttcagtgctgaaagtggtgtgttaaaatctctaaatattattgttttgggatctttctcttctttcaactctgataatatttgctttagatacctgggtgctccagtgttgggtgcatatatacttaaaattgttgtatcctcctgatgaattgacccctttatcattatataatgaccttctttttctctttgtgtagtgtttgtcttgaaatctattttgtcggatattagtattgctgctaatttttttggtttccatttgcatgaaatatctttttcattcctttattttcaggcagcgtgtttctttatatttaataggtgaaatatgtttcttgtaaataaaaattattattttaaaatatttttaaaataatactattttttaataagaacaattattattttttaaaaaatttcattagttttgggggcacaagtggattttggttaaatgggtgagttctttagtagtggattttgagattttagtgcagcagccacctgagaagtgtacattacccatatattatatatatactatatatgctttatatatatagtgtgtatatataatatatatacaactacatattgggtaatgtacacttctcaggtgactgctgcactaaaatctcaaaatccactactaaagaactcacccatttaaccaaaatccacttgtgcccccaaaactaatgaaattttttaaaaaataataattgttcttattaaaaaatagtattattttaaaaatattttaaaataataatttttatttacaagaaacataattcacctattaaatataaagaaacacgctgcctgaaagtaaaggaatgaaaaagatatttcatgcaaatggaaaccaaaaaaattagcagctatactaatatattatatatatactacataaagcatatatatagtatagtatatatataatacatttataaagcatatatatagtatgtagataatatatgtttatatactttaagttctgggatacatgtgcagaacgtgcaggtttcttacataggtatactcgtgccatggtggtttgctgcacccatcaacctgccatatacattaagtatttctcctaatgctatctttcccctagccctaccccactccctgacaggccctggtgtatgatgttcccctccctgtgtccatgtgttctcattgttcaactgccacttatgagtgagaacatgtggtgtttggttttctgttcttgtgttttagtttgctgaggatgatggtttccagcttcatccatgtccctgcaaaggacatgaactcatcctttttgatggctgcatagtattccatggtgtatatgtgccacgttttctttatccagtatatcattgatgggcattttggttggttccaagtctttgctattgtgaatagtgctgcaataaacatacgtgtgcatttgtctttatagaagaatgatttataatcttttgggtatatacccagtaatgggattgctgagtcaaatgatatttctggttctagatccttaatgaattgccacactgtcttccacaatggttgaactaatttatgctcccaccaacagtgtaaaagcgttcctatttcttcaaatcctcaccagcatctgttgtttcctgactttttaatcgccattctaactggcatgagatggtatctcattgtggttttgatttgcatttctctaatgaccagtgatgatgagctttttttcatgtttgttggcagcataaatgtcttcttttgagaagtgtctgttcatattcttcacccactttttgatggagttatttgttttcttcttgtaaatttgtttaagttccttgtcgattctggatattagctctttgtcagatgaatagattgcaaaaattttctcccattctgtaagttgcctgttccctctgctgatagtttcttctgctgtgcagaagctctttagtttaattagatcccatttgtcaattttggcttttgttgccattgcttctggtgttttagtcatgaagtctctacccatgcctatgtcctggatggtattgccttggttttcttctacagtttttatggttttaggtcttgcatttaagtctttaatccatcttgagttaattttgtataacgtgtaaggaagaggtccactttcagttttctgcatgaggctaacgagttttcccaacaccatttattaaatagggaatcctttccccattgtttgtttttgtcaagtttgtcaaagatcaggtggttgtagatgtgtggtgttatttctgaggcctctgctctgttccacgtgtctatatctctgttttggtaccagtaccatgctgttttgggtactgtaccacttgattggtgagagagggaatccttgtcttgcactggttttcaaagggaatgcttcagcttttgcctattcagtatgaccaatatgtagtcttttattcctcaccctctctcaacaccccacccccacggagtcctcaaagtccattatatcactctgtatgtttttgcgttctcatagcttagctcccacttataaatgagaaaatacagtatttggttttccattctttggttacttaattagtataatggcctccagctccatccaggtgtcttgtttttcatccattcagccagtctataacttttgcttggagagtttcgtccatttagattcagcgttatgattgataactaagggcttactcctgccatttggttgttttctggttattctgtggtcttctcttccttttttccttctttcctgtctcccttttagtgaaagtggttttctctggtggtgtattttattttcttcctttttatttttttttgtgtgtatttgttgcatgttattgatttgaggttaccatgaggcttgtacataatattttctaactcattatttcaaactgatgacaacactctatcgcataaaaaaacatggaaagagaaaactaataaaaactctacattttaacttcatctctctgcttgttgtcactttgtcgtttctatttacatcttattgtactgtttatgtcttgaaaagtagtttcagttattacttttgattggttcatctcatagtctttctactcaagatatgagtagttcacacaccacaattacagtgttacaatattctgtgtttttctgtgtactttcaattacccatgagttttgtattttcagataatttgttattgctcactaacatcctattctttcagattaaagagctccctttagcatttcttgtaggaaaagtctggtgttaatgaattccttcagctcttgttgatctgtgaaagtctttatttttccttcatgtttcaaggatattttcactggatagtctattctagggtaaaagttttttttttttttttcttcagcccttcaggtaagtcatgccactctctcctggcctataaggctaccactgaaaagtctgctgccagacatatatgagttccattctatgttacttgtttattttctcttgttacttttaggatcctttctttatctttgacctttgggagtttgattattaaatgccttgaggtggtcttttttggattaaatcttcttcgtgttcttgtacttggatattaatatctttctctaggtttgggaagttctctgttattatccctttgaataaactttctaccaagatctctctttctctctctgtctctctctctctctctctctccttcttaaggccaataacttttagatttgcccttttgaggctgttttctagatctcgtaggtgtgcttcattgtttgctattttttttttttttttgtctcttctgactacattttcaaatagcctgttttaaaactcactaattctttcttttgcctggtcaattatgctgttaagagactctgaggcattcttcagtgtgtcagttgcatttttcagcaccagaatgtctgcttatttttttttagattatttccatctctttgttaaatatatctgatagaattctgaattctttcttagtgttatctttaatttccttgaatttcctcaacacaactattttgaattatctgtctgaaaggtcacatatctctatttttccaggattgctatctggtgctttatttagttcattttgtgaggtcatgttttcctggatggtgttaatgctagtagatgtttttcagtgtctgagcattgaaaagttagatgtttattgtagtcttcacagtctgggcttgttcatacctgccctccttgggagactttccaagtattcgaagggatttggatgctgtgatcttagtctttggtcactgcagccatatctgctttatggagcatcccatgctcagtaatgctgtggctctttcagactcatagagttactgcctgcatgctcttgggtaagagccaggaaaattccctggattaccaagcagagactcttgttctcttctctcactttcccccaaacaaatagagtctctctctctctctctctttctctctctctctctccctctcattctctgccgacctgcctgaatctggggtagggatgacacaatcacatttgtagtcaacaccattgggactgtgctaggtcagacccaaagctggcacagcactgagtctcgcccaacgcccacagagaccactccctgggtaatgtctgtgtttgctcaaagcctaagggctatacaatcagtcagtggtgaagccagcctgtcttatgtccttcccttcagggtgatgagttcctcaagcaggtccagggatggtgtccaggagccaaggcctcgagctgtgactgagctggcacccaatccataagacaaagattttttccacactttccttccttgtcctcaagcaaaggagtctctccctgtggccaccaccacccccatgttcatggcaagtattgtctggctaccaccaatcttcactcaaggcccaggggttctttagttagcttatggtgaatgctaccaaggctgagtctctcccttcaaggaagtgggctcctctctggcccagggcaggtccggaaatactatccaagagccaaggcctggaatcagtttccccaagagtccatttggtgctctacacccactgtggcagaaccagtacccaagctgcaagacaaagtcctctttactcttccttctcctttacagagactctccctatagccaccacagctgggaatatgctgggtcactcttgaagcaagaacagctctgagtctcactcaaaactcctggcaagtactgcctggctatcacactgattattcagggcccaagggctctttagtcagcaggagatgaatcctgccagtactgattccttcccttcaaggcagccggtttctttctggcccagtgtgtatctagaaatatcatttgggagctagggcctggcatggtgacctcaggactctgcctggtgccctgttctactgtggctgatgtagtatccaaattgcaagaccaagtcctctttactctcccctctcctgtcttcaagcagaaggaatgagtccgccctggagttgggagctgcattgcctgggattggaggaggggtggcacaagcactctcttggtcaccccagctggtgtcttactaggtcgcatgttccccaagtccactggctctgaggctagcacaccaggatttgaccaagaattgcaattcttgtggcttacactgcctttcaagtttatttgagatcccagagcactttagcccacagtgacagggcttgccagaatttagtttctgactgctgagatggacaatttgcgtctgattagggctggtctaagtgctccttctgtgggcactggctgagttctgctccatgttgctttctgctgtgacagggcaacattgagtttcaatgcaagtcccacagtcactgcaatcttcctctcccaagcctgctctgaacaccatgtggttgctgctgggggctgggggagggatgttgtaggcaattcaagaatgtctttcctacccttttcggtgcttctttccttggtatgatattaaaaccagttactgtgattgctcacctgatttttggttcttatgaaggtgcttttttgtgtggatcactgttcaatttgtgcctgcaagcggggatgggggacaattgctggaggcttctctttggccatcttgctccacctctaccctagtattagcaatttcaaagcagttgggatggaggtagaaggaaagggcgcttggaatcagaaaatccatgtcttagctttgagccttagaaaattcatttgacccttgtaagcctcagttgcttcatctgtaaaagagaaataatataatggctgaaaagatcaaaggtgataatgcttttgaaaacactatagaaaatgacaaaatatcacatgagtattattttctagtttctaggagtctccttaccattgtacaggacaaccatgtctatttttaaataaattattatttgcctctgagcaaccctgcaaagagttgcctgtaggagaaacagctttacttgcaaatcactccactgttttctttgtgcacagcttattaatacataaggcacatgtcctccagcctgcagtaacattggaatcattacctctttggagtacctaccagagcttctcaaagtgaattttgtttatcaccacaaaaaatagtctgttgcagagataacctccaaattcaatgacaatatttccaatcacttttgcatgatgcagaaatagacaaatatataattttgcttatagagacaattattgtctcccaacaagtgatcagtagtcagaaaatggccaagaaataccatggggtgtgccttcccataacagcttatctttgtgttttagttgcaaggttactaaaagcctgtgcagggtttatggcaaaagtaaaacttgctccaggagcaagcccttgtttcattgtctaatgttcttaatccccagcagacaggatttggatctggcatttggtaacagggcagtttccaaagttgctgtacgcaacttgaggaagagaggtgatattatcggaatgaatttctttgttgtaagttataaatgtatgggcttttccaatcccatcacccttaaaactttatttgttttctgcagtgagggtgtctccgttgtctttaatatgcttgctttgagttcatggatgaacattcctgcctggctgacatgtggactctctgaaattgttataaggtctttttctttgtttttttcttgatgcccaagctgccaagggtagtactggcagtggtgggcagacaaggaggtgatagcaaactttgtcctctggcctcccttgacccattccattcattatctaagggactccaagccagcattccacagagtgccctcaccaaactcactaagactgaaggcgaaccaggattccaaacagccattatgaaaggaaagagagagagacttagggtttgcaaaataagataccctgttgattctttttattccatacagatactactattctttaggaaaacgttaaaatcacatgatcttccaggacctgggctgcttctttaagaagcatgttacagaaagctttattggccaacaacatattgaaagatagattaatcaatcattcattcaaataaggtatattcagaattgaggtatattgtagccagacagtgagactacaaaaaaagaatgcaccgtacccttatctcttgcacaatctaacgagggagataaccactctttcaatttatagtgacctataacatttcgtacactgctgaatatctttacatggtaataacacaatggaaagcttgcaaaatagacagaggctaggggaagaaggattgagtgtgaatatagcctcttataaatcgagaggaatggtctgtgtcttctgatcatacagagataataaatatggaaatgatttcaaactaacaaagcaaatgtgcagaaaatactgagaatatagtgggcaggatacctgagttttggttccatctctgttattgactcattgtgtaatctgagtcaggtctgttctgctctctggatctcaccctttcctatctgtaaaatgagattgttggattagatgatctccatagaggttctcacctattctgacattcaaaaggactcctaatttttcttatataataataatatatatgatctgtagagtgctttacactttatatgatatttttgcatctgttatctcatgtgagaaaagcactggactgctggactggcaatgaggacacctggattcttgtctctgttttgacactgattcatggtgtgatcttcaagcaaattctctgagtttcagtttctcaatctgtaaaataggggggtatgaagattggactaaatcagtaggtctctaaaatgttccacaaagccctggggtggggggctcctacagagtttcgctaaggcaaaccacaacgctaagcctgcatggaagaggagaaaaagagtggcctgacaagagaagttcccagtttcctatgccaaccccaggcagattacatttaattttatctgatttatatagagagtttctatgtaatgttttattcttaaaaatagtttactataaaaaactcaactggtttgatttttaaagattgcacatataagtgagatcatgcagtcagtatttgtctttctatgcctggcttatttcacttagcataatgtcttccagcatcatctatgttgctgcaaatgacagacttttcttttcattaaaggctatatagtattccatcgtgtatgtacaccacattttctcttttgtaactttcattttaggttcaggggttcatgtgcatgtttgatatataggtaaactgcatgtcagagaggtttcttgtacagattatttcatcacccaggtaataagcatagtatctaatcaatttttttctgatcctctcccttctcccaccctacaacctcaagtaggccctggtgtctattgttcccctctttgtgtccattacaccacattttctttatccacttatccatccatggacacttagtttgcttccatatgttggctattgtgaataatgctgaaaaaagtcaaactcatagaagcagagagtagaatggtggttaccagggactgggaggcagttgactgagctaggaaaagagagataataaaagggtacaatgtgtcagttatatagaaggaataagttatattgaactattgcacagcatggtgaccatagttaataataatgtattatatgtctcagtattgctaaaagagtaaatttaaatattctaaccacaaaaaattattagtaggcaaggtgatggatatgttaatttgcttgatttaatctttctagaatgcatacatatatcaaaacatcccactgtaccccataaatatatacaattattatttgtcaatttagaaatttaaaaacttgatttagatgagctctaaggccttaagtattaaagtattaagtattaaagtgatatgtaaccaagtatattgtttggtaacttcatttttgttattattttaacaaaccaatatattgtgaatatacttccaagtgaaaagaaaaaagacattgcagtcatcactaataactgcaaaacattcctttgcaagaatatggaataattcatttaatcattcccctaatgttagacattcaaatgtttccaactttttctatttaaataatgctacaataaacttctattttgtgcttattgtattattttcttacaacacatccctagaagtggaattcctagaagtttatacacatttccaatttttttccaaatatatggcaaaatttctctctaaagtatttttattcctaccagaaatacctcttcaccaacacgtagtatttaatctgtaccaatctggcttaagacaatgatatttaatttgtatttctgtgatttctagctaaattaaataatcttcatatgcttattggtcatttgtacttctaactgctttctcctgtctgttgcccatttttctattgtgctgtttatttttatatatcgaatatattgaccattggttttacatacttgatgctaataattattcttagtttatggtttgtctttgagttttataatggtgtttatttcacataagaaattataaatgttttctaatgaaatttatcaagtctgtcttcacttatgttttcttcattgtcaataacttaaaatgaccttttctacctttaaaaattttgaaattttcctctgtattgtctaatagtacttacatgatttcctcttttaaattgacatatttaatccatttggaatttattttgattttaactagtaatttaactttattttcttctccaaatgattcactagttgttctgacattatttagtgaataattcatcctttcttcactgaattggaatggcatattccatatactgtgtctggttttggcttttctgatctcttccactgatcaacctaagctggagccagtatcaaactgttgtaatcattatgcctttagatactttaaatgtacagcagggaatgtcttattactcttatttttcacaaatatcttggcattgtctcatgttttattccttcagataaattttgggattattttgtcaagattttgtttgagttgttttaaatttttagatttcattgggaaagaactgaaatccttgaaatattgcttcttcttagccaggaatatggtacaactttgcatttaattcagttctttccttaaataccaccatgaagttttttgttttgttcatataggtcctgcattaacaccatatatataaagtgtgagaaatactacattcttcaggattctctgtaggttaacaatgaagatgatgactcaaccctttctttgtttgcataatgtgatgccactaatagtgggtaacttctctgccttacctcctctgttccaaacaggatttttcagaatgaacaaattaaaagaatcataatcagacactaaccccaagccatactgcatggcagcaccaatgggactgacagaaaacaacagaaataggaagaaatcctacagagaaacaaacttgaaagctgtctcatggcctttgaatcatacttaagttttatgatggaaggatacgactatgaagaaagacacagagcaacatcagacagtcaagaatttcagagccagctggcatgcagtggacctcatgccagcccattttatgactatttaggtagtcaagggtttaagatttttctaataagacagttattatgcatttcaatgagtgatttctttgcagctctagagtgtggccttacctacttcaacatgagaagatttttgtattttgtcagtcatttcacaatgacttttagtgagcccttcattatagactgtggatacaactttgctgttggaaattaacagtgtcaaacaactgggtataatgtttgtaatatctgaggagggggagctgcctaggaagttgtattccctgtgttaatttttcagtctcttaggttatagaggaccttctagaaccaccttacagcaggattacatcccatttacacagttctctgtcacttgaatacagagaagggatccacaaggccatatgcttcctagacaaagagaaaagatttctgccacactcagaacgctttgtcttcagactataatcacccacaccatatttcctttggatccactttccagatttttgtgctggcactaacaccaacttgctgtggcttggggcatgtaatttcaatactttgtgcccattttcataagtgaagtgtcaggcatcacattggacattttaagattctttacagcccaatgattctgtgtttctaattaggcccaatgggttagagctaaaaggaaacagtgagtttcctggaaggaaaggacatataacacagtccagaggtaaaatgggctgtattcaagaaaagataggacaatactttgcagggatgctgcagagaggattcaagccttgtatggaggaatggatgtgatacaaccaaaaagtctttaaaaattctttccaactaatctgagatttgtaaccttatggactgtgatttgcagcaaaccaaggatgtgataaagactagtattgtttctagaatgcaaggatggttcaacatatgcaaatcaatagtattaacagaatgaaggacaaaaactatatgatcatctcaatagatgcagaaaaataatttgacaaaattcaacatcattttatgataaaatctttcaagaaattgggtattagaaggaatgtttctcaacacaataaaggccatatcagacaagcccacagctaacattatattcaatgaccaggaatgagataaggatgctcactctcaccacttctgtttaacatagtactggaagtcctagccaatttcatattaatgagcctcattttcttcatcatagaatgaagtatataataatccctgttatacttactttgcacagattattattattatttaattattattttgagacagggtctcactctgtcacccaggctggagtgcagtaccacaatcacagcttacttcagccacgacctcccaggcataaaggatcctagcccctcagcctcctgagtagctgggagtacaggtgcacaccaccacacctagctaatttttttttttcatttttttatagagacggagtctcactatgctgcccaggctggtctcaaactcctgtgctcaagcaatctttccaccttggccttccaaagtgctgggattacaggagtgagccactgcacctggccttgcagattattattaaactttgtaaactaatcaaatgagagtgattattgttactgttaagaactctgatagcctcatccatatatttggagaaattgaataaataataggaaagaaataatagcatcccaatgattttaccttggctctaccatcatttggggaagtgataattcagataggagaagtgacttggaagcagtcttgagagattgcctgttccatcccctatctttgtccttaaaccaaattgtacagataaataaggtcttatttttaggacttacagaaaaaagattcctttcatatccatctttgcaatcctcaaccacttctgtcactattatgtgtcatttcaaacattaaattcctcattctgctttgaaggaacacatgtgtcatgtgtacccatttgtatgttttggtgtgttttatgctttatgtgatcacccacatatgcacagataattccaaaatccagtgtgtgggtgttgtattccctgtgttaattattcagtcacactcaaacacctatgcactcacacatacatgaatacacacatgtacattagcatgtttatgcttatgttgcatgtgactggcaacatcagtgcctttctaaggcaatgttaactaccttgagttttgggagagctttagagaacaaagacaagagactaaatgattctagatgtaagagacaatgttgcaataagttactatcctaaaaagacagaatacagggacaagagactattattttggatagtttcttgcttaccagtaatacttaagtcctttacattaaaaaaaaaaaactctgtaaatatattgcagaagaaatccagacatccttcaagattcttagagctggaaaagattttaatgactttccagtccaatctatctcatgtaatcaatggggcccagagaggcaaaaggtcttgtccaaggtcatatagtgagttagtgataaggctgaacaaggattcagatgttggggcttccagcccactgctctttctctcatctgggatttgtgtatttttgttcattagagattttcctctgtaacctcaatatccaatgcagggccttgcacataatagattatcagtaaatgttaaattaatatgtcatggctttggttgtactgggcttttgcacttactcctgagtaaattgtaaagaatatctacgttttaggttgccttgttttagaccaagaggtacccagagaaaaggtgtgaactatgctaaggaaattatccgagttccaaattgaaaaaaaaaaaaaatcatgcttttccgctataacctctctcattcacagagtgattctctttcagaagggcaatctagaactattatgggagccatattccattggtggtgcaaccatttcttgacaaactagggtccaagaaagtattttcctggggaagatgagatttctcaaagaaggcacgcactttctaacctaagcttatttcagtaatcaatgtaacaagctggtcttgatgattgcagcagtaccaatactgtgggagtgtaccagttctagaacagctacaacattggaattgaacgcactagaattggatacaggacctgtttttgaggagctaacacccaaaggctgaacagcactcgtagcaccgtcctttctgtgcacatatggtagtcctcagtttgcaacagaaataaagctgttagcaaattatgtgttctatttatgcaaataaaatcttgtggtatgctagaaagagcactggcctggagaccttagttttctcatatgttaaaaacccctaacacaggcctggttcatagtaggcacccaataaatagtagttttcttcctttgggggcctccgattcagtgtgcttcttcaggtaagtcacttccctggaactcctccttggaatgagagttgtactgttgtgatttttaacagttccttcaagccaagcattttggaatcctttcataaagggagaaaggaaggaaagaagaaaggaaaattaaaggaaaaagaacaaataaaacgttaaaaaggaggaaaggaaaaaggatcctttactacaataaaactaatcttatgttcttgcaagtagcactttaagtaaaagaagttctttgctgacctggttactactgaacctactacataaaatagcctactataatagatgcatttatgtgcctaatcttcactttttaggcttagtaaagggagaggaaagctgatgtatagttaaatttatgtttttagttgtttttttttctactctcaaatatcaatcactctttagtttctctttctttttccgaccacaagcattcttcctctgcttaaagaagcttccctaaaatcccagtctatccagtaagccaaagcacagcaataaatttgaggaaaaaataccagggacttagagacagaaaggagtgaggggatgcagaagctgaagctggagcacggttgcaagcatgagaagttctgcgtgtttcagagcagccaaggatgtatttttgcctattcctgctggtgactctgtgtgtctatgcatccatctgctatatttacatgtttagtcagtcaatccacgtttgctgagagcctgctgtgtgccaggattgtgctagcgtaaaggagcaaagtattgagcaaaatatgtttgagcagctgtaattctgaggatctctaggtctgagcatgtgtatgtgtgtgcgcttctatgtatctgtgacaactccaggtgttcatgacagtgatctttgttactctgttggcttcatcgaacttccttttacttgctgtgattcactacatagagtgggctttatctctgatttttataacctgcaagactgggggtatgatcaccagcaatctaaaaacagttagaaatcccatggagttatcttttgtagaaattttcctctactaatattatgaaaaataagcatcttattagctcgagtgtaattctatgcatgattacaggtatcaataggaagaaacattgactgagttcaaatctcttctacgccatgctaaaggggtgacaagttccacaatggatcattttctcatgggcatttctgacttttggtaaaagtagagcaccttattttaaaaaccattgagtagtcctaatagtggagatatcatcaggatctgaattgttcatccctaaaaaaaacaccaatggaaatcaaacaatatagtgccaaattaaactgtttgaatatttaggttctgtatgatcaaattgtttggtgccatactctgtccacttttttcatgtggtaggatataatttcatatcttttctgttctagaaatacccgaagaaagagactctggaaactcattatcaggtctatcaactcttgtatttgttctcccagggaaacagaagtacctgtgcgccagcagaaatgattgcactattgataaattccgaaggaaaaattgtccatcttgtcgtcttcggaaatgttatgaagcagggatgactctgggaggtaagatacttttctttctcttcctcctccttcctctctcccccttctccctcattttctagtctctctttagaccagattttcttctttgatgcttccaaggggaccagccatgctctagacacaggctgaccctttcataggcaacgtggccatcagccagctggtgccttttttttaatccttatctataccaatccccattccggggctcagcattagagcaggcggtgtgaagcagggatcaggagccaacagaaggtgagtgaggatgcatctgactgggcagggcccccaggggacttaatgatactggcctgatgttgttcagtggtagctaggatgagagaactaagaaatccagaacagtcagaggtgcaggatgacccaggcataggcgcaggatgacccaggcacaggctgatcctgaacacctgggaatatcccttagctaactgctgcctatgttgtagggccagccacctcgaatgagaagctacttctctttggagcctgtgactaggctgccacacagagccaatttcctatcctatctctcccaaagatgagcaggtgttttaataatttccttttctttgcaaagctattgaccatttccaaaagcattttttttcagtagcacagtaacgtgatagatggaagatacagctctttcaagggcgttcctctatcataaggctctctgtcccacaaacctgtctaccatgagtgttgtcaccattccagaaaggcttgacatcagttgattgagacttatattttccctctccaaactcccccatctcttcatgtttacatctgcccaatgccagggtcctcgctgctgcctgctacttccaaaaagatgtgtctttcatgagaaaaacaagatcattaatccacttcgatttggaaatggaatttgaagaaaggcaagcctatttctgagtgcctgcaactgtagcctcatacccaattattcattattagcctggaaaacccaagtgcctagaatccaaccctctcccctctcctcttaagtctaatttagaccagttgtctatctctggctttctgtgaggtgttcaataccttgtctgcctatgtgcacatttatagacaacaactagttctcttatcctggagcagggccatgtgtggatcttcatatagataactatatcctccccatcctcacagggcagtagtattatttaaacagaacaaagtacctcacatgaattgacccaggctggatgagagacaatttcaaaagaatcatctcaagtagcgtccagtactcccaaacatcacaggtagatgttctgtgagtggctttccaagcatccacatcaaatgagactcagatatctgagaaaactcaaccttgttttggtttgcttggtgcaccccaaagaaatccaacaattgaggtctacagtggagaagaagtaggactggggtcagggagtacagaggcaaaggcaggaagggtgacaaagtgattgacaagaaaaaatgttctccatatgaatgttgcagccccatgttgagggttcttatacactcaactgtcaattatttagccttctgtgaattatgtatagtataaaagatagggactctcaagtagggaacctcttggcttgccatctggcaatatgaattgcaagtccactttgatgcaggtaaagtttaatggtaacaaaagtcctcataacatttggatgcaaatcttaacattaattccatgtctcagccaacattctccattattaagcagcctgtgatgtgattacagtgaaccacttttgaaaaggagcctgtgtataacagatagtttcactatactatataaccgtcagatgcaggcttgtaaattaatttgttggtgacaatgtttcagtacattttcaaattgattcattggtatagtactcaaatttgagtgggcttggtgaacacaatgaagacaagctgagaagtgctgtgactggccttcatttcagttgcaggcccatgatattttgagtgtcttccatgtacaaggcaccatgctaggcattagagcttgaggctggcaaacttcaggaagtgttcacaagataccaggattcttgatgttgtgtaaatggccttgcctttagagtcaggcagatctagtttaaaggctcagctcctttatttactgtgtgcccctctgagcctcaatttcctcatctctgatttagaaataccatcctcatagagttataatgagtatcagatgacatgatgaatgtgaacatccttgataaatagcaaaatgctagacaaatatgggggcttaatatgacattgaggtcactagtaatttagctggaaagtctgtaacacagcacttcccgatggcttttaccctaagtaacttggtatgccatataatatgtaacagcaccaacaggcagagaatcgccagaaaacactcttgattacctcaaacgaaaaagtaccaccaggatcctgttcagaagctaattttagtaattaagggaatcatatgctatgttcaaataccatgccagtaaaaacccaattgtttaccttcttaaatcactgcttgaagagcaaatctttccattttgctgaatgaacttatctccacgttccctgccctactgacacaaccccctcccaagtttattgttaacttacacattcaatgcacagcacacctttactcaaacaatggaaaagaaagaaagtgtcaattcaaagtggcccttgtctattccttaaggagtagacttccattttcatcagatttggatttagcatagacatattgattaccttgaagaagaattcatataattttatcttctgattcccatcactcaaatcaaaattacataatatattccaaaatggcaactaggaatgtggccttgggcaagtcccttctctcctctgatgcttggttttcccatcatagaactggaattgtggcttcaccgaggacctttctggtgctaacattttgtgattctatgtaaaaagccacacagaaaggattgtttttcagccctttcttagattgtctgttccctgctcccagaagtatagatagtgagacttgagtgctttgatacatcgtaattgtatctacctccattcacacctacttaagatatctgtctaaaagtagactagacagattattcagagagtggagggcagaagggctgtctctgtatcttaaagaagctggcactcttcagctgatggctgcttggtcttgaggcctcaagatctttaatctggctttctctatagtgtttcattcactgtttggtgatggaatctcttcagttcagagatacttaatagatatagctttttctttcctgcttccaggcctacctacctgtttcttgcttttttttctagcagctgttgttgtttctgaaagaatcttgagggtgtttggagtctcagaatggcttccttaaagactaccttcagactctcagctgctcatccacaacagagatcagcctttctttgtagatgattcattcctggctgcatttgaaaaccacatattgttaattgcttgacgaatttaaatcccttgactacttttcatttcagaaaacacttacaaaaaaagtccaaatgaggaccttccctccagtgaattagctgtggctttctcacagtccatagttaggataaatgtaaagccatttctcatttttctccgcactttccaagggtacactccttgtttccaagatggaatgagaaataaagaagtgcccttcctgccatcttctcccctgaccctttcctccttcccactttcctcctattcctccccaaacatgatttatttctgcgttttgcaactcttgagttctcagcatttagtaaatggtgttggtccctgttgattccttcctctcctggaccatggaaggtagtaggcctttcagaaatttcaggtagcagccaaaccccagaagaagagaaggaacacagagacctagaccatgtgagaacctgaggtgtgcagcatttacttcacagattcgtctagcatatttgagaggtgtctttcctactaggagactgaactctgcatctgagaataaaaacttaacatatctacaggttttgacaacctctgtgaattatctagttgagaggatggctcaaggagcctattgccatggtctgatgtcgttatggacgctatgaacatccttgcagtttccattgttgaagacagccctgatgccagctgtctcatcattccccatgttcaagagcatcccagcattgctacctcaggatcccatgtcctgaatgcaacagagtgatttcgctgctgaattactattcatggcatggctcttcacagcatttattcatccatgtatctatccattcatccttccagccagccaagaagttcacgctttcatcttttcatccatttactcacctatttattcatttagcaaatatttattgagtaccaactatgtgccagacactctgctaggcattttggggaagcagaactgaataagatactattcctttcctcaaaaatttgagcaagaggagaaaggaagtaatgaggaatattccttagccataaaggaaaaataagaaatcacttggaagaagttaggtgagatggaaggaaaaggacatctaaggtaaagcgtacagtttgaataaaggcacagagacatgaacaaaatgcattgagggtttgaggaacagcaattggtttaacatggccagagctggggaaatggtaagggcaagctgaaaccacattgaaagcaaacttggttattatactaggtagtttagacttcaagcagttgaaaatctttgagcatgggataggcatgatgacattgtgtttatttgcatgtttctttaaagaaaactggcagcagcacaaatgttttgttgatgagggtttaaattgtagaaagtgagacaattttaggaaggccagctagagagaaatttctagcatcaaattttgctaaacacctaggatttgtagttacctccatttgggttgttacctgcaagtactgaccacgtatatgaagaagtactggtttagaccaaggcaattggcttgtataagaggcctaccctcataccaaaagccagtttccttggtctaggccagtgtttactggtatgtgtcctgagaaaactagttccatgacatgttccatgaaaaatatgatttctattgtcaaataagtgagggaaacttgcatatcatggtcctgctcaggaagatttacaatccttattagcatatcacaggtcctggtgaatactgcggtaaagtaaccgaggagctttgtaactcaggattcccgaagttgattcaaccacaggacctcatttattcacataacacctgttatcctacaaaaccactgttctctggaatacactttcgaaaacatgggtatagacaaaaactctatcctataggcagagaatacctatacctctagctcaggtcatcattttgcagatgtgtgtgtcattaagaatcagtcaataatgcattaatgatcaaaagcagaccatccttaccacatggtgcataagattatgctattatgctattagctactaatgccactaaagttaattatgttgggtctgcaacgttgtcatacacaaaggataggatgcaaaactgtcctaggccaaagcatggttattgcccaagttatctaatgtctgcaggtacatattcctggcctaaggattgtgctaaagaagttatttctaagaaatatagtgacttccagcatcatgcagaatgaccatttaatattttgaatatctagacattctgctgtagaatttaatagtccttttatacactgtctgaccaacattttgacatttactcagaaccccatcacagtgctaccacataacctcattgctaaagtgggaggcctagaaatcacagatttgtagaaaccatccaatgattgaatcccctctacttcctgttcagcaggcagcagagtgtcataaagaattaacaacgtggaactcagttactgggatttcttccattctcctttgattctctagactagaattccaaagaccctcaggctggtgatgcaagtgggaagtctcatttctgagaagtgctgcttcctacccacaattctttgatagctgagtgctttagctgatctgcataactgaggtgtgcaccaaggagcagaattactctataaattttggcatcaacatgtgcaacttgtgactcagcactttgaaactctggggatttttttgtttggttggtttttgttttaagatgtcctgtggtatagtggaaatagtacaatagactcagatacagagaggccttgtttctagtcttggttctgtcacttactatcttgatgtccttgcacaaatcaccagacctctctgagcctcagtttctccaaccacactgtgggaataataaaatcttttttacggcattgttgtaagtatgtagagaaactggtacacagtaggcacacaatcaatgtcaccgtacccttcagcccttcttttgtggatgaaaaatggtctttgtgctcccagtcaccactggggtctgttctctctctctctgctgttacagtgtggcttttggttcttgtttctttgttctttggtctgtaaattacccttgaaacaacccttgaaatttccactccatgacctaaatcgtcatccctaaattggttacatacatatttggtgacactttggaggggaaaagctttatgtctctctaactgtagttcttaagggaatttgcatatggaaaaaacagagactgcgtctcttaattcctccaaaccaaattatctgggatagcacatatatgttgtactctgtctctgagcatttgctcttagagaactatggttagagcgaagtaaatttttctaatcataaaaattaatgataccgcatatctgatacttgaatgagtacctccttgtaaaatttatacttaaatccttgagtttttaaagtgtaatagcaatagaaagattttattgttgtttacttttactgtgagtgctccaaaatccctcagttgctcttgaaagagcaagatgatgccataggcaatattttccaaaggtagtaggcagaaaactgagtacacagcacacaataggccatatatacaaaagcaagtattttgcaaataataataattcaggaaaaaagcttcactttcgttggtaacctgtttgtttaaaaccattttattatttattatttaaaaagagtgtcacttgttacagattgtgggatgtgttccttaagatcacaaaaatgtaaaatattttctttttatactgaacacatgcatagacaacttacctgagcaagctgctttttggagacatttgcacatcttttgggatcacgttgttaagaagtagaactaagggaaaaacacgcagccacccagaaatcggtagagccttcagctcatctgttattaatatttctgtgacaacagatatctaggaagtaaacaggaaattgcatcgctatcctgcatcaccttttttggaatcaggttccattcttctcagtccagttcaaccttgtgatactttttagatctcaaccaaggcatagaaatatattttcccttgcttaataccccatggaaccaatgcccctgtggttgaagtaaaaattgattgttgagggacatttcagccctctagcagtcaacaattaaaaacatgtaagcaccgagcacctgcagaaaacttggactggcatttggatctaagaagaaaatctgcatcttgaccaagatgaaaagtcaccagcccaagcttgtgcagtgaagtgtcatgttggccacaatgaaactgaaagagactgatgactctcctcagggtggaaaatgaggcatggaagctttgattagtgagctgttaggcacacagacattaatttcaaagcattctcatctccagtctgagtaataatgcttatagtattatgcaattgtttggctgctgcaagaaattcagcagactccaacaagtagtctttcttggtctctgagtgactgtaacttaaattctacctcccttctcttctcctacatcttctcactccccaccccacccccacatacacacaattcttgtccactatgttcagagagatgcacgcacacatatatatgtatatatatagtatatttgtcaataaagcagaaaagaagaaaaaactccaagtaaacaattttccatttccccatctcacttctgtcttacaagtggataggaaaagaaaaacccccagtaaaaaatggcaaccgcccacctccccaactttacatgctgcttcctatgttagaggatctgtcttaggcatctgattatggagcctgctagatacaagcccgtatttagactgctacagtcaacaatgtctctctttcatactagaaaaattccgggttggcaattgcaagcatctcaaaatgaccagaccctgaagaaaggctgacttgcctcattcaaaatgagggctctagagggctctagtggatagtctggagaaacctggcgtctgaggcttaggagcttaggtttttgctcctcaacacagactttgacgttggggttgggggctactctcttgattgctgactccctccagcgggaccaatagtgttttcctacctcacagggatgttgtgaggacgggctgtagaagtaatagtggttaccattcatgtagttgtgagtatcatgattattgtttcctgtaatgtggcttggcattggcaaagtgctttttgattgttcttgatcacatatgatgggggccaggcactgactcaggcggatgcagtgaagctctggctcagtcgcttgcttttcgtggtgtgctgccaggaagaaactttgctgatgggactcaaggtgtcaccttggacaagaagcaactgtgtctgtctgaggttcctgtggccatctttatttgtgtattaggcaattcgtatttcccccttaggttctagccttctggatcccagccagtgacctagatcttagcctcaggccctgtcactgagctgaaggtagtagctgatccacagaagttcagtaaacaaggaccagatttctgcttctccaggagaagaagccagccaacccctctcttcaaacacactgagagactacagtccgactttccctcttacatctagccttactgtagccacactccttgattgctctctcacatcacatgcttctcttcatcagttgtaagcctctcattcttctcccaagccagactcaaatattgtattgatgtcaaagaagaatcacttagagtttggaatatcttgttctctctctgctccatagcttccatattgacaccagtttctttctagtggagaagtggagtctgtgaagccagggaaacacacatgtgagagtcagaaggactctccctgacttgcctggggcctgtctttcccaccttctccagtctgtctaaacacacacacacacacacacacacacacacacacgctctctctctctctccccccccaacacacacacactctctctctctctcacacacacacacatacacacacacttctttctctttcccctgactcagcaacattctggagaaaagccaaggaaggacttcaggaggggagtttcccccttctcagggcagaattttaatctccagaccaacaagaagttccctaatgtggattgaaaggctaatgaggtttatttttaactactttctatttgtttgaatgttgcatatttctactagtgaaattttcccttaataaagccattaatacaccaatcgtattttcttatttacaacagactgagagaattaatgctgttaacattggatcttttttcttttttttttttccttttttttctctctcgtttgctttccaggtcatgctgacctgttcagcttggactgtttcacatttgtttttaatgtcagtttaaatgtaattgtaaaagcatgtatgctctaaaatcatgtagttacttttttcagtggaaaagcctggtattcgaaagcatttccaggctctgcaatttcatatgagcaggtttttggtaaaatcttttgtccctcactcagggtggtatctggacagtgagcccctttcttctggctcagtagtcagagagaggagacttggagacagtttctgctggatcctgtgctttggcaaggatgtgcagcattgcatatcattctatcattaattatgtttactcctccatgaactaaaaaccattagactaaatagtccaacataaaccttgaaagataaaatttgatattcttttgcctggccatttctctgacccagaattggggctgggaggggattggagacttgggggaaagaatcaaggagccttcttgcctgggggaatttggcatgcacttattaatcccatttggttgcactccctactaatccctcactccatacctgccaaggattggctctgctccctgcttctcatccctgtcctagttcttcctcacctatctccatttcccactactgatccttctctccagtaagatgctattcaacccgatgaaatataaagagtagcaccaccctggaagtcaggataccttagttttagctcctgctctaccattatctagctgtgtgacctggggcatgacttaacctttgctcttcagtctgaacagtctttaagaattggtttggaggaggaaggaagggatagacaagatccaaggcctttgaactcttttttggaaatgggtccttttcttcaaacaaaatttgatgcagagtcccaaatttacctacagaataaaatactgctgttcttgtttgaaaggaagtggggtgcttggagccacatgctcaggcccactttgccccctctcaggaaccctcgaaaaaacttataggacttataggactgttggggatctgccaagtctctcttatgttacatttcagtccttgtgaaactctatatgtttcatcagttcactttttcagaaagttcacctgcttggggtaaaggtcatgaagtggagaatgtggggctcagtaactagcaatagtaaaaaacatcattgattggcttgcagaatttactctgttctaagcatcttacacacatactcatccgaaaactcacaacaaccttgtgaggtagatctgttattatcttaagattctgaaacctgccagcatgactctcaatctttgacttgagaccagttgcccaacatggaaggttatacttttcacagtttaccaccataagcagtctttcagagtgatttctagctagagatccattcttagaaaaagtcagaacctgcccattagcatacactgtcacatggtgcagagtaccttcactgggttcatctcatttcctcctaaaaatagtcctatgcagtagtccagtcatatcatcaccattatatagatgagaaaaactgaggtgtaggagaaatcaagagatctgttcaaggtcacacattccataagactctgaataccaccatcaagaataataaaccttttatgtgaaaagcattttagaacttcagtgtcattattgcattctgcctcctggagttcagtgcactttttcaccatgctttaatcttggagtcctggtggtacagaatctgccttctactctcagacaacaccacagtgtctttatccctcataacaaacttatgaattaagtaatgatattatccccattttacaaattagttaactgagataccaagaggctaagtcttgcccaaagtcacacagctagtcagtgatagagccggagttacaaatgaggcatcctgactccagaatatttgctcttaactactactctttatacatatgtaaggaaactaaaagcaaaagagggaaagatgtccctgaggccccacagtgagctcccctgactcacaatccagtattcctctgaccttctaatcctaaagttatacagtaaggtcccttgactctaatcctagtagatggaaagatggctggcatgatttaagccagaggccacaaactggcttccccagagccagaattcacctgcagaattctgtttgtccagcacagtgtttgtttagaaaattgacgtagactgcccctaggcagggcatcaatcactgtcattgtccccagccctccttatttatgtttgccaggcttttttactcatttatgtgtctgcctgacttgtgaaggtatttgagtttatgacttttagatttaagcattgcaatatataagcactgcacacatgcattcacaaaagtatagcctagtctagcttcacaaagaatttgtagccctacaccaaacacacctttatgtttacttagtgtttagaattagatttaagatcagaatttagtttcacaggcattcatgtgtggaagaacctcagttattgttttttgtttcatactgtctcacccttgctttccctgctgtgtctggacccctgtcaatcctgctttctgccattcttcatgcctgagttagggcccctgcaagccattcactggttaatctttaggaatgaatggagagtgaaaaccagtttggagggttcactgtgtcccaagcatcctctcatttagttctcataagtgtcctaagagacaggtagcagcacattcgttttataaatgaggaaactaaatctcagagaagctgaacaaagacctcaaagtcattaaggtagtaattaacggagccgggatttgaacgcaagactgttggactccagagcctattcttttgccctacaccacagttccttacaaggaagatgtattcattttctattactgcataacacattgccacaaatttagcagcttcaaacatttatcagctcactgttttgtaagtcagaagtctggcacagcatggctagattctcagttcagggtctctgaaggatgaaactgatgtgtttaccaggatgcattctaatctgaagctcagggttctcttccaagctcatgtaattattgcaggattcagttatttgtggttgtaggactaaggctccctcttcctttctggctaccagccaagggccattctcagctcttggaggctgccctctttccttatcatgtggaccccaacgccttcaaagccaacaacagagactcttccttgtgttgaatgtttctcactctacggatgtctttcctggaggatcccagtcccgtaagggctcacctgatgaggtcaggtacatcaagaatagccacccttcaaattcaactgaattagcaccttcattacatctacctagcctttttacaacagcatctaggttagtgcttgactgaatgactggaaactaaggtctcagaatctcggggaccgtcttagaagtcagcctactacagatgttgattcttttcatgtgtcaaatttcatagtgagatagggagaacagaaacatcacatccttgaccttaggtaaagggattcaaacttcctaagactttggaaacttcacgccactttcaccttttccttaatcatggttgagaaggcctatatcttggagtggccaggagtgagactggaacagtacctaaaggttaaggacgctaaagaagttacagattggttacatctgctcctccctaggaatgatccatggaacctgatttgaaatttttttctctggtgctatagatagctcccacaggggtctaatgccccagggctgaaaagttagttccccataggatccatccaggcatgatatcaggccaggtgttacaatctcctaaagaggaggtatggactggaaagccccttgccaatggccctttcttgtcactgctctgacccaagactaacagggcagagatagtgaactcacatactattaaaactatccacttatacttccccctttctctttgctttatcactccatttaagtaaaccaatgagtctctgccttgacacagtggcaagctgacctgtatcttatatgaaagaattagatttgactctggggctcaggtgcagagggcaggaggggcataaggatggccttcatggaagaaaagaagtccttggatactgagtaacagctgagactagcaagcctcattgtccaggattccaagtcgtctagcaacatcctggtctctgctgcagacagaacagaggatcccccggcagaatgaatggagtctgatttcaattacgttcagtatagtcactctctttaggcagagaagccagaacacctggtgcagctagggccactgtggtcacagggacaagcacactacctgggtcctggaggcaagtgggaatgcagtttttcttccttaagcagatgccatataggcctggggaggaggatgtgagaataccagccaagttctcattggcactatacagagaaaggggaattatttcatcttgatggattctccccacagtctctgcacatattgatcttacttgtaatgagtttgcttaggttcacgagtcatcatcccagggagatctgagtcattggtgggaaagtcgaggcgacagattatatctcactgatctcactgtcaccaattgctctgtgtgtccctccaccttttgaaaaagtccatggattcatttgtgtgtaattcatttggatttatttcttctttatcaatagctttagtggggtattgcaaatgggaaagttgccccagagaacagtgtacattcacagcattattcagtagaactttctgagatgatgaaaatcttctatatcttatgttgtacaatataatacagccactaactacatgtagcttttgaacactggaaatgtggcaggtgagactgagggattatatttttaattttttaatgttgtaattaatttaattttttaaaatttttgctttctattttatagtttaataattaaactaaacttacgtagcccacatgtggctagttggctactatactggacagtacaagtctagaaggatctcagagagacacatgctgagatacagcaggaataagtcaaaaagagagccaatgtaacatagggaattctggattgggaattagagccctggctctaatctcagctctgccactaggtgaccttgccctctctggcttcagcctccccatctttgacttgaaaggttaaactaactaacgtcgaaagtcccaaaatggtggctatggactgaattcaattttgggatacacaagtttcaggaattttttaaaaatctattaatgccttctaggtgtgtgtatgcacgcttgcagacatgtgcccatgcacaagcatgggaaggcagtaaggcattcatttcaattcaccagtgtactaaccattcacacacacacacacacacacacacacacacacacatgcacacacaccctactgtattgcctatgtagagcctgaagatcttttaatctgtcaccattggataagataatttctaaggacccttcctgttttgtcatgctgaaaatctttaagccactatagtgtcccaaatctattccagtttgggcagatgactggagtattctcatagcctcctgtctattcccttctggatttgatactagttatgaagtttggagtcaagggtgaagaagggaggcagggatgatataaccccagccccactcctcaactctgcttttgagttagaagtagggttcagggcttcagattccttggggaggcagtagagagaatatgggctttataatcagaagatgaggttcagatgattgggttctcaccttttttatagctgtgttacctcagtttattcatttgtaaaatagggataagaaatatctttaacctcctaagatcatgtggaattaagtgatgtaatgtgatgaagcgaggcacgcagaaggccctgaaaaaattagtagttacccttaaggggactaaatggtctggcaactcccgagctcaaagctagaaaggtccagtaatggggaagatggggtctttctgtaggaactgtagcaggggagcagatcctgtaggccaccagtctgtggagctgtgtccaagaactcatgtttgcaataagcccaccaaatgacaagttattgtggggttcaggcctctaactcaagaagatggtcttggcccagatcataccttgcagcctgtgcctttggtgggatgtgggtgttggcagtggctatgcatatctccttattactggctgtgccaaagccccgcagaaatgattgttggacaaagtcatcttgcactcagggctggttttccaggcttccttgttattttcccctgagttcttctgtgttcctcttgcaacaccaaccccactattttcctcttccctaccctagttgttggtccaaacatgtaatccattcttgcagtgatttattgggtgacaccatgactggagtttgcattgaaggacttctttttctaattagaactaaaagtcagttccaggctgggtgtggtggctcacgcctataatcccagcactttgggaggccgagatgggaggattgcttaaggccaggagtttgagtccagcctggacaacatagtgagatcccatctctacaaaaaatgttaaccaggagtggtagtgtacaactctggtcccagctacttgggagactgaggagggagaattgcttgagcccaggaagttgaggctacagtgagctttgatcgtgccactgctctccagctgggtgacagaggaagatcctccttcaaaaaataaataaaaactaaaaaaaaagtcagttccaggttgtatcttttttcacaggggccagacacagatgagagcaggttttgttgtatttatccatttaaattgagcaataaaattctctctttggtttctacctttcttatttattattattatgttaaagggattaaagtggttcatggtctttctcagtgcaactgcttatgctagacctcagaattatgaccttttcaattatttatatttctgtctatataaatactggaaaaaatagtacaaagtaagcatcggaatgcctaaggacctctaaattgtgtgtgtgagcacatggggaagatggttcttaaggtttgagttttggattattgtggttgtcttaaataatgttatttctatcattctttccaatgactgtctcctagcatagttcccattttacagactgatggcagaggcagaaagattctctcacttctttgatactattgaggacttcagcctttcaccgctcttctcccctttgctaaaaaagaaaaaaatcaatatgtatgttacagtgcatttttttaaatattttttattatactttaagttctagggtacgtgtgcacaacttgcaggtttgttacatatgtatacatgtgccaagttggtgtgctgcacccattaactccttatttacattaagtatatctcctaatgctatccctccacccttccccaaccccacaacaggccccagtgtgtgatgttccccttcctgtgtccaggtgttctcattgttcaattcccacctgtgagtgagaacatgcagtgtttggctttttgtccttgagatagtttgctgagaatgatggtttccagcttcatccatgtccctacaaaggacatgaactcatcattttttatggctgcatagtattccatggtgtatatatgccacattttcttaatccagtctatcattgatggacatttgggttggttccaaggctttgctattgtgaatagtgccacaataaacatatgtgtgcatgtacctttagagcagcatgacatataatcctttgggtatatacccaataatgggatggctgggtgcaatggtatttctagttctagatccctgaggaatcaccacactgacttccacaatggttgaactagtttacagtcccaccaacagtgtaaaagtgttcctatttctccacatcctttccagcacctgttgtttcctgactttttaatgatcgccattctaactggtgtgagatggtatctcattgtggttttgatttgcatttctctgatggccagtgatgatgagcattttttcatgtgtctgttggctgcataaatgtctttttttgagaagtatctgttaatatcctctgcccactttttgatggggttgtttgtttttttcttgtaaatttgtttgagttctttgtagattctgggtatttgccctttgtcagatgagtagatggaaaaaattttctcccattctgtaggttgcctgttcactctgatggtagtttcttttgctgtgtagaagctctttagtttaattagatcccatttgtcaattttggcttttgttgccattgcttttggtgttttagacatgaagtccttgccggtgcctatgtcatgaatggtattgcctaggttttcttctagggttttatggttttaggtctaacatttaagtcttgaatccatcttgaattaatttttctataaggtgtaaggaagggatccagtttcagctttctacatatggctaaccagttttcacagcaccatttgttaaatagggaatcttttcccaatttcttgtttttgtcaggtttgtcaaagatcagatggttgtagatacgcagcattatttctgagggctctgttctgttccattgatctatatctctgttttggtaccagtatcatgctgttttggttactgtagccttgtagtatagtttgaagtcaggtagcgtgatacctccagctttgttcttttggcttaggattgtcttggcaatgcaggctcttttttggttccatatgaactttaaagtagttttctccaattctgtggagaaagtcattgatagcttgatggggatggcattgaatctatgaattaccttgggcagtatggccattttcacgatattgattcttcctacccatgagcatggaatgttcttccatttctttgtatcctcttttatttcattgagcagtggtttgtagttctccttgaagaggtccttcacgtcccttgtaagttggattcctaggtattttattctcttagaagcagttgtgaatgggagttcactcatgatttggcttctgtttgtgtgttattggtgtataagaatgcttgtgatttttgcacattgattttgtatcctgagactttgctgaagttgcttatcagcttaaggagattttgggctgagacaatggggttttctagatatacaatcatgtcatcggcaaacagggacaatttgacttcctcttttcctaattgaataccctttatttctttctgctgcctgattgtcctagccagaacttccaacactatgttgaataggaatggtgagagagggcatccctgtcttgtgccagttttcaaagggagtgcttccagtttttgcctattcagtatgatattggctgtgggtttgtcataaatagctcttattattttgagatacgtcccatcaatacctaatttattgagagtttttagcatgaagggctgttgaattttgtcaaaggccttttctgcatctattgagataatcatgtggtttttgtctttggttctgtttgtatgctcaattacatttattgatttgcatatgtggaaccagtcttgcatcccagggatgaagcccacttgatcatggtggataagctttttgatgtgctgctggattcagtttgccagtattgtattgaggttttttgcatcgatattcatcagggatattggtgtaaaattctctttttttgttgtgtctctgccaggctttggtatcaggatgatgctggcctcataaaatgagttagggaggattccctctttttctagtgattggaatggtttcagaaggaatggtaccagctcctccttgtacctctggtagaattcagctgtgaaatccatctagtcctggactttttttggctggtaagctattaattattgcctcaatttcagaacctgttattggtctattaagagattcaacttcctcctagtttagtcttgggagggtgtatgtgtcgaggaatttatccatttcttctagattttctagtttatttgcatagaggtatttatagtattctctgatggtagtttgtatttctgtgggatcggtggtgatctcccctttatcattttttattgcatctatttgatttttctctcttttcttctttattagtcttgccagcagtctatcaattttgttgatcttttcaaaaaaccagctcctggattcattgattttttgaagggtttcccatgtctctatctccttcagttcttctctgatcttggttatttcttgccttctgctagcttttgaatgtgtttgctcttccttctctagttcttttaattgtgatgttagggtgtcaattttagatctttcctgctttctcttgtgggaatttggtgctataaatttccctctacacactactttaaatgtgtcccagagattctggtatgttgtgtctttgttctcattggtttcaaggaacatctttatttctgccttcatttcattatgtacccagtagtcattcaggagcaggttgttcagtttccatgtagtagagtggttttgagtgagtttcttaatcctgagttccagtttgattgcactgtggtctgagagacagtttgttataatttctgttcttttacatttgctgaggagtgttttacttccaactcagtggtcaattttggaataggtgtggtgtggtgctgagaagaatgtatattctgttgatttggggtggagagttctgtataagtctattaggtccacttggtacagagctgagttcaattcctggatatcctttgtgtcttgttgatctgtctaatgttgacagtggggtgttaaagtctcccttgattattgtgtgggagtctaagtctctttgtaggtctctaagtaatcactttatgaatctggttgttcctgtattggtgcatatatatttaggatagttagttcttcttgttgaactgatccctttaccattatgtaatggccttctttgtctcttttgatctttgttggtttaaagtctgttttatcagagactagcattgcaatccctgcctcttttggttttccatttgcttggtagatcttcctccatccctttgttttgagcctatatgtgtctctgcacatgagatgggtttcctgaatacagcacactgatgggtcttgactctttatccaatttgccagtctgtgtcttttaattggagcatttaggttaatatttacgtttaaggttaatattgttatatgtgaatttgatcctgtcattgtgatgttagctggttcttttgctcgttggttgatgcagtttcttcctagcctcgatggtctttacaatttggcatgtttttgcagtggctggtaccggttgttcctttccatgtttagtgcttccttcaggagctcctgtagtgcaggcctggtggtgacaaaatctctcagcatttgcttgtttttaaagtattttatttctccttcacttatgaagcttagtttggctggatatgaaattctgggttgaaaattcttttctttaagaatgatgaatattggcccccactctcttctggcttgtagagtttctgccaagaaatccactgttagtctgatggcttccctttgtgggtaacccgacctttctctctggctgcccttaacattgtatccttcatttcaactttggcgaatctgataattatgtgtcttggagttgctcttctcgaggagtatctttgtggcgttctctgtatttcctgaatgtgaatgttggcctgtcttgctaggttgggtaagttctcctggggaatatcctgcagagtgttttccaacttggttccattctccctgtcactttcaggtacaccaatcagatgtagatttggtcttttcacatagtcccatatttcttggaggctttgttcgtttctttttactctttttttctctaaacttctcttctcgcttcatttcattcatttgatcttcaatcactgatacccttttttccagttgatcgaatcagctactgaagcttgtgcattcgtcatatagttctcgtgccatggttttcagctccatcaggtcatttaaggccgtctctacattgattattctagttagccattcgtctaatcttttttcaaggtttttaacttctttgcgatgggttcaaacttcctcctttagcttggagaaatttggtcatctgaagccttctctcaactcatcaaagtcattctccgtccaggtttgttctgttgctggtgaggagctgtgttcctttggaggagaagaggggctctgatttttagaatgtttcagtttttctgctctgttttttccccatctttgtggttttatctacctttggtctttgatgatggtgacatacagatgggattttggtgtggatgtcctttctgtttgttagttttccttctaacagtcaggaccctcagctgcaggtctgttggagtttgctggaggtccactctagaccctgtttgcctgggtgtcggcagcagaggctcagaacagcgaatattgctgaacagcaaatgttgctgcctactcattcttctggaagtttcgtctcagaggggtacctagccatgtgaggtatcagtctgcccctactggtgggtgtctcccagttaggctactcgggggtcagggagccacttgaggaggcagtctgtccgttctcagatctccagctgtgtgctgggagaaccactactctcttcaaagctgtcagacagggacatttaagtctgcagaggtttctgctgccttttgttcggctatgccctgcccccagaggtggagtctacagaggcatgcaggcctccttgagttgcggtaggctccacccagttcgagcttcccagctgctttgtttacctactcaagcctcagcaatggcgggtgcccctcccccagcctcactgctgccttgcagttcgatttcagactgctctgctagcagtgagcgatgctccatgggcgtgggaccctccgagccaggtgtgggatataatctcctggtgtgccgtttgctaagaccattggaaaagtgcagtattagggtgggagtgacccaattttccaggtgccatctgtcacagctttgcttggctaggaaagggaatttcctgaccctttgcacttcccgggtgaggcgatgcctctccctgctttggctcacacttggtgcactgcacccactgtcctgtacccactgtccaacaagccccagtgagatgaacccggtacctcagtcggaaatgcagaaatcactcatcttctgcgtcactcacgctgggagctgtagactggagctgttcctattcggccatcttatgaatcatgcatgttcaactatgagcaactatgtgtattcaatgggaaatggaataccataaaattgtcatatgttgagcccaaaatgataggatagaatttgatagtctgaggatggaaaggaccttcaaggccacttttaaaaaccccattcccatatgatgcttgaattcttaaccactgtgtgtctagtattttctcatttccagtgatatgtgtgcctgccaacctttccgtctccaagagctttaactatcaaaatgtatgtgtgtgtgtttttgtgtgtgcatgtgtgtgtgagtgtgcgtgtgtgtgtgtgtgtgtttagagagagagagagagacagaaagagaaggagagactaaaatccaattcactgttctttctgggacccaaagaacaagtctagtcattctccatttctagtctctttccctagcaatcggctagacatgctagacatagacacatgtacatcactcctttgaattacaacattcagtatttgtctatcacttatatgataaaatacaaacttagcttttatttttatttttttagagacagtgttttactatgtcacccaggctagagcatcagtggcacaatcatagcccactgcagcctggaacccctgggctcaaggaatccttccacctctgcctcctgagtagcagagactacagatgtgcaccaccagacccagctaatttggttttttactattttttgtggagatggtgtattgtcttgtggtgttgctcaggctgatcttgagctcctggcctcaagcactcctcccatctcagcctcccaaaatgctgggattacaggcatgaaccaccttacccagccaaatttcttaatatgatatacatgctcctttaaaatcaagcaccatctttgctttcaacctcattattaaccactttcccatatatgcaacatatgtttcagccatactagtgtctagtttttccctgaacactccttggtgcttttgtttatgccctttctgcccacctttgcctggtgaaatcctcatcaatcttcaaattctatcaaatactatcttccatataaagcattttctaaacccacctatgtaaaaagattagtgttttcctattttgttgatgcctccattgcagcattttccagtccaacgttttctagaattgattgtggccaggctaccagactgggccagggcctgtgtcttttctgtcacccagaagcaaaggtctaacaatggatatctgctgaatgaatgaacgaaaatgaatcattaatatattagtaaatacgttaattaaagttccaggtatgaatactgaaggctgcattcaggcagagctggatccaaggatatgctaggttggtctagcacaagaatcagagttttcctctgcaagctatgaaaaatttgggtttagcaggtatttgggatgatgaattatacatttaaccagtgttgaatgagcacttgtccttaaggagtttagagtctgtgaccagggagaatggtgattttcttagctagggcagtttttctaaaaaggtagttgcattgtgtgtttttgaccactgatgataaattcaagtctctcttccttcccaatagcccggaagctgaagaaacttggtaatctgaaactacaggaggaaggagaggcttccagcaccaccagccccactgaggagacaacccagaagctgacagtgtcacacattgaaggctatgaatgtcagcccatctttctgaatgtcctggaagccattgagccaggtgtagtgtgtgctggacacgacaacaaccagcccgactcctttgcagccttgctctctagcctcaatgaactgggagagagacagcttgtacacgtggtcaagtgggccaaggccttgcctggtaaggaaaagggaagtgggagcatgagataagggggatcatatttagtgaacgctcctatggaccagccaccatgtctggtgcttttctgcccattaactcaggcagtcttcatcataaccctgtgggagagggattgttacaagtctcaatttaaacatacagggatcgaaactcagaaagcaaagagaaagatagtattatcgggtgtcttatgtggcccacattgatgcacagcagtcatgctttcatattcaactcacaaaaatggtcagcaaattttccattaatcacaaatcacatagacatacccatatatgccttaggatgctcttctatatttgcacacacaggctcaccccaaagataatctctagtttgactgacattctgtcttcaatgtcatctttaggagctatatcatgggaactctcataatatggtatggtggaaagaacatgaggttgggaatcagaacacttcgggtctgctcttagctctgctagtaacttattgtgtgatcccttccccttctgggtctcaatttctctatctgtataatgtataaagcgtggtttgtatcaaattgatggtttccagtttttgaaaaaaggaacgctttttgcaccttaaactacctaaggaatcataatgagaggaaagattaggtaatagtgaaagaattaccaagtgttggtctaacagaagttggataacagaagttcctcagtgatggggaactcacttctttcttatgtcatctgttgtttaaacaagtctggttattaaaatattacagcttaaggaattcttagagatcctctatccaatgattcacaaactttcctttagcagccaagtgctttatttctcaaaagaattgtacacagatacaagtggagctagtttatttaaagccagagcctgtagcttgggcctcaccagttcagcctctttctctctatcccagggaagccctaggtcactcttgcaaaatcttagggctccaaggaacacagtttgaaaaccagtgaagtatatgccctttaaaggttctcctaatcctgcaattatgattcaaagattcttttgaaataacaacaaccaaaccttctcttgtggagtcaaagattaacctgcctttcaataataactgccattcaggtagaaatttatagtgaacagagcaattttgtatgtattacctgaattgattcttataggaatcctataacatgagattctttctcttattttacagaccaaatagggaagctgtgagaatgatgtgattggcctatagttacatagtcagaaaatagcaggaccagaacttgagcccaggttctctcctgattccaaattctctctattccactccacctgtaggctgtagcaccactgcagttctgtagctctgggctttacagtgaggggccaaggcttcattgaaggccacttgggtcatagtatgggcttgttgcatttgaagacatttcatgttggctgtcaagtcttagatttgtatttccaactcacagggcctggtcacagccctaaccatctcttataccttctcagcttgggaagctgaggtcgactagccaataagaacactgggaaggaaacccaaggactctgactggatatgctctgtgccaaaacagagggttcactcagagaggaaaaatataaaaaagaaaaaggagaaggttgctttaattcttatcactttttcatctggatattttgatatcatgtgtttgacagagattcaaagtttaatcttcccaagcagtttccaaacacttatctcattttataggctacagagctttttcatatatatgatcccacttaatctttacaacaattctatgaatcatagagactattatttccatttcacatgccaaggctcaaagaggttaactaacttgctccatttggtcacttaacacatggaaccagaacttgacctagaccttcgggtttctaaattggttatcttgacaataacctagtgcaaaacactatagcagaatttgtatgacttgggatcactggggctttccttggcccaaccaccaagatggaaagccccctccccttacattaacaaatctgcaagccaatatcagttcaccatctagcttgccagactaaatgatttctgaccccaagtcttttaaaagaatagcttcaaaagaaagccaattaccacattcacaagaactgttcttcatattatctataattacctacaagtacaagtaatttgctaattcaatagattgagttcttgacctgtaagatgaactgtgctaggcccctaataagataaattttgttttaagttttctgtgacagtaaagatgtatgaaaattgcctagtagagtacctggcacattaataaatgataactgttaatttggagtgggtgagtagactgggtgtgcacagtatatttagaatcaaatttatctggtttggaatcctagctatggactagttctgtgaccttgagcaaatcacatgtcttctctgtgcttctgtgtcctcatttgtaagatgatagaataatcactacctttcaaattgttgtcaacaaaaagattatgtataaagagcacctagtaacgtagcctgaaacatagtcaatgctctgtaaatggtggtttattattatgagacttgaatgctaagccactgctttcacgaaactcaattttagctaccacttgccttgcctagaagctcatgcatggaccccaaggtgaaattgtgttctctgaagacctcggctggcagatgtactacagcagcaaagatttccaaactggcctttctttgagcccattctcccagactagacaggagactacaagtttctgctgcacatgaaaaaaatatgatgtcaatcggattctagtgagaaaacagagtctcaaagaaactgcttctgctccctagcgtgtttaatgtgtttcagaacctgagaatgactcctctctgtttctccagaacagcctaacacagtggcaaatgggtgttgagtgaatgcatacttaaggaaatctgtagggttgcagctactctttcctcaagtaatcccttgatagtcatgtaggctacttcagagattgggcattagagaacagagtcaggtattataatcagattagactctagggaggttagccagccatattgctgatatgtgcacagttactgggtttgagtgctaagcagctctcattaaggacggttaattaatattatggccaaattaagctttcccttttctctcctctttgttagttcggtggcattttagggagaaaaaaataagcatcagtatggacaatttgcttgatacctgtacaatttaattctcatccttccatgtgccttcacattcacacattccaccagaagaccaaggttcaccagccaaaagcttttcttgctccccactgcctcctacccaagatattcagggtcaacctcccaggcctcttctctaagagatccttggttgctacatgcttagaccctgcttcttatttcctgctgagaagggtcagtccaaggcattctgtgctacagaagggttccaagcaggaactactctgggatctgaggctccagccggtctgtcagcgtgtcattacagtgaaggtgggaagcacaggcctgggagctaagactgctaagatgagggactctagaatccctgatacctggaaggcctaggatctaaaagaaaagaacagggaaatggggctatatgagtggacagggaccaaccaagcagaacaatgtgtctggataatgtagacttcagacctgatcctatggctgacaaaagctggtgaccttggtagttcctgagctgtaaccttcattagtggagtagaaaaaacactggagaagagaatcagaacacctgggttctagtattagttcagccacatataaaccatatgaccttgggtaagtcagtttatttctctggccctcatgttccttgttggtaaaataagtgccacatcacctaacctctgggattattgtgagagttaaattaggtcatcaacaggaaagtgagaagtttgatctaaatttggggaagcattcctaatgaggtatgatgacaaaatttcagataattctggatttgttggtgagaagagagagtgttggtagggacgagctctgaggtgatgcctttataactttaagcatccaactgtttcaaaaactccaggagaacatggccatgtctgttctacctgtgtattattgtagacgtagcttctgggagcctctgctctctgagcttaagggaggtaatttggagatcatttaattctcattttacaaaaggaaaaaaaattgagggtctttaggccatttgtttaggtaatatttcttaagtgcccactcaaatacgtggactgtactaagtactagggaggtaaagataaataagaagatatggtccctgtcttcaagaagctccaagtcttgtgggggagacagacatgtatatacatagacttcaatgctgtgtaatgactgctataattgggtgaggctacacaaggtgcaatgagaatgtaaaagaagaatctttaagccttcttcttggatgagttgggaaagccttcacagaagaggtagcctttgagtgaagacttgaaagatgagtagtgtttaccggatgaaaggcctgagaaggaggaatgcattctaggcaaaagtaactgcctgtgcagagataacagagatatagaggcatgtgagagcgcaagtggcaagagatcagtctaggtaggcaggtcataaagggcctattcatgtataatgatggcagtaagatgaggatggcagtagggtgggaaattagtagggccagggtacctattgagtagaaaagaatggagaggaaatgccaggcagaaagaggatggacgcaagagagggaacatgaaagtggtgaacaggtggcagtggctgtcaagacatctctccataccctgtacactgtatgtaatatccatctcccagggttgttagaagggtcaaaccagatcgtagctggaaaacagctttgtgaagtgaaaactgctgtttatgtgggggaaatgattgttaaactgcatctttggaaaggtgaagtgatcaagagcacagaccttggaatctgactgctttgctttgtaacttggtctgccaattactagctgtatgatcttggacaagttccttaacctctctctgactcacttgtactggttcacagaatggagataataatagtacttaccttactcattgttgtgaatgttaaatgagataatataagtaaagtgcttagaaaagagttaaatgtaccccataaatacatacaactatcatgtacccaaaattatttttaatttttttaaaaaagagcaatccaatagcaaaagaaaaaaagagttcactcatataagcagtcaataagtgttagattatttttctcttacaactgacaatgccctttttgtctccatcatcatctcatttgagcagctcagggaagtagggaggataaggaatattatcctcaccatatagtttgtgcttttccccaccaccccttaatggccagcctggatggtccctggggatccttaggggatgcccgaataccagagcatctctgcccaacagggactcagacttagctcaacccgtcagtacccagactgaccactgcctctgcctcttcttctccaggcttccgcaacttacacgtggacgaccagatggctgtcattcagtactcctggatggggctcatggtgtttgccatgggctggcgatccttcaccaatgtcaactccaggatgctctacttcgcccctgatctggttttcaatgagtaagtgctcctggggcccagacctcactaaaatacagcagcttggccagacctggttggtggtgatggtgatggggtgacagtgaagcttagctcatttgatctgcagttgtcgcagcggatgccccagccagccaatccagtatgaggcggctttgccctggctttcagccaactggcaggagcccaggaggatggtgctgagaccacccctttcacacccaagaaccaatcctagtcatatttctggtctgctttgcagcttatctcaaaaccacatggaaagattcctccccttcacatataaaagaggcagaaagactctggctttaagggctggagtttcttgggttcttttgctaccaccaaaggctacttctagtcaccatttgctgagcaactagtttgtgccaagactatgctagatactttctaaatcctagctcattgagtcctcatggtgacctgacctcacctttttatagataacactatttttttatggatggggaaaatcaggctcagcaaaataaagtgactcacccaaagtcacagagctagtgcctgttggagacaagattcaaacgtatgtccctgtcgatctcagctcttctgcgtcatggtggtaactgatgggaaggagtacctctaccgctctctggctgtgtgaccttggtactgccattttccttcccttaaacagctttaattaatacctgccctgccaccagctccatataacatcatgaatttggccagtggctcagattttggaattacatttttctccactaaaatctcagttctactattttcttagtcagcatctttgggaaagacctttaacttttccgaccctcaatttcttcatccattaatgataacagaaccttcataagtaatttcttatgataactaaatgggaattgacagatgtggaatgtctggcccatagtaggcaagaaggaaaaaaaaagtccctttctgattcaccctttccctaatagtgatacattttttttccccgagatggggttttgctctgccacccaggctggagggcagtggcgcaatgatctcagcccagtgcaacctccacctccctggttcaagcaattctcctgcctcagcttcccgagtagctgggattatagatgcccgccaccgtgtccatctaatttttgtatttttggtagagacgggatttcaccatgttagccaggctggtctcaaactcctgacctcatgatctgcccgcctcagccgggcatgataatcttttctatgtctgctgtatgaggtccctcgatggcattgtgaatggagctggccagagaaatcttcccaaggaccttgagctagtctcaccacagagaatccttccagtcaggacaggaattgaccttcccccctcttcagccctctaacccagaagagtcttaaaataaaatctacaggccaatggttccttccagtacagcactgcaatgcgagggagagtgagcgtccccagctgccctctcccaaccctgccagcctggtagccaaaagctaagaataaccactaggcttttggcacaaactgctttgtggttttcagatctccgcaaagttgcctatgatgccatcttctggggcaggccttgaaaagccccctaactgttcatctcccatccttaaacccctgctgcccttaagcagttgaatcaactccatgagcacctgctctaccttccccagagccctgagacctttggagctttgaaaagtgataattggttgttctctaaatcctcatttccttctctgcctctaagtaagcatgtggcatcccacctcggcttcctggtccagtcttgttcatcttataaaaaggcctccctacggggtcagaggcctagacccatcaaacccagggctcctgaaacaataggacccctattcctcctgtaggaagccactgtgttagagctctcagggtgtctacaaacatctagataagtgtttctcaacatggattctgttgacatattgggaaaaataattttgtcattatgtagaatatggttaacatacctggcaccagcctactctataccaaataggattccagtcattctgacagcccaaactgctcccacacatttctgacacccactgaagaggcagtactctccagttgagtgcaactaatccctgccagccttcctaaggtgctaatggggagcctcagacccaaagagagagagaagaacttgtccaatgtaggtcaacccatttgctgatctcttcaacaccaagctctattatcagccctgtttttttctttctttctctctttgtagagatcacatgttgtgaggataatgagcttgaaccttagctgtgtgaccttgggcaaattactgaacttctatgtgccgcaaattttatctggagactgctgaagagtattataatagcacctttctatatgtcatttattgaacacctgctatgtgtcaggcactgtgctcagtgttttccaatcttcatttctcctcttattttctctcttgcactcccaccaaccttgttctcttcctaaattccattcctgcctcatttttctaccctccattctcctctctcttccttcctttaactgtctccctagtatttttccccttttccccctttcttttccccttcccccatgaatttcttctctttcctttccccttctctttcctccattccccactttttctgcccctgaggcctgcagcaatgttaaaggaatcctcattccagcattgtgatttcaatggtaaaaagattgcagcattgtcatcaacagaggtgggaaagtacattggagactggagcagagccagacctcagggtcagccaatcttactaaaaaattctctacagtgaaagagcttggagcaacactgttctgctcaattgatttgtgataccatctaaacacttcctctttctagttgggcttcagcctgagttgaataattctacaccatctgccctcttctctctttctccaggacagccaagatctctctgagataggatgctgagcttccacccagacaataccaggcctgctcatcctatggagtaggctagtggcttggaaaccaaaatgtcaaaccatagcctttaggctccatctgggaggtctttgtcctcaccacttaagtgggtgtcaaatttccttccctttctgcacacgctgcacaatcaatttctgtcttacacacacacacacacacacacacacacacgatttttgaagtgctgaaaactggaaggcctactagcatgaggatgctgtgtcttctcttagaggtatgccatggtcagccatggaaccgagaggttgctcttccttgaaaagctggccaagcattggccacttccccatataatttataggtgataatgtggtgatctgttcagaagtgactataataaatgcaactcacatatgtctacagtttccaaactgtggtaaggagcagccagcatatgagggaatgggctccccttcagcaggggacatttaaactagacattcaaaaacactccctggcagatttaacattggaactcgttttgaaagaacaatgtggaatctccttcactgggagtttttgaataagtatgaaatttctagtattccaggccagaggcaaaggggtcaacaggatgaccaaacacttcgggtcatttgcaaatcttgatgtcctgatgttaagagctgactactggggcttctcctaaaaatccttcatgttgagctgcctggaaggcaggttctcattctggctgtagctgagatgttagaactgtagtcagggagaccatgtgcctcccccattgtgttcatttggttaggctttcctgtccctgactcagaaaacagaaggggcacagagacctggaaattccatgtgctaacccatatcctggccagagaagatgagtagttatcagggtgtcaggattttggaaaacagagagagaaaaaaaacaaacaaacagacaaacaaacaaaaaaaccttttcctggtccctggagcaccagcaggagaaacagcaagctcttcttggaaaacctggcgagggatggcaatcagagacattccctctgggcttattgtaaacttcccctcattcctttttcctctgtgtatctccttcccaggtaccgcatgcacaagtcccggatgtacagccagtgtgtccgaatgaggcacctctctcaagagtttggatggctccaaatcaccccccaggaattcctgtgcatgaaagcactgctactcttcagcattagtaagtgcctagaagtgcagggaatgccccctgagggcacagagattcagagaggaccacttttgccattaaaacattattagggaaaagccagctcctggacatttcccttcttcattccccctccccatccccactctactctctctcagcatcattttcctaacaagaaacaatttcatgactagaagccaatttatttgctagaagtcaacctccatcagattccccacctatccccagtctgtctttgggacaaggcctttttgactggttacagcaggtctctgaatttttccatagcttctgctatagaaacagacatgggccaccttgtattctttgcagggcagtagagcaggaggcatttcctcctggaaagatttcctcttctgccaacaggaggagatctatgtaagcaactcagataggatttgtatggcagccaaggaacttttctttaatatcttttctaagagccctctcttagcccctacggagggagaagggcaaaatttgatattcaaagctatgtgttttggttatctaaatcagggttttactgtgaatgacataaaagcttaggtcctaaaaaatgagtatctgagaagagtagaaaaagaaaaggttcaggaaatttgatttacttgactcctttcagatcggatccagctatcctttcccctgagatctccctgacagactgaaggccccaagcacacagacttcaactaacaggaagccaagtagatggttccctgtgggggtgggggtcaagtctgtggtcagaaaacttggtgctttgtctaatgctccttcgtgggcatgcttcccctccccattctgtcttcatcccacatcagttccagtggatgggctgaaaaatcaaaaattctttgatgaacttcgaatgaactacatcaaggaactcgatcgtatcattgcatgcaaaagaaaaaatcccacatcctgctcaagacgcttctaccagctcaccaagctcctggactccgtgcagcctgtaagcaaacgatggagggtgctttatcagggagaacagcctgatagagccaatgataatatgcttctctagagtctggcaccacctgttgggaggtgcttccattcccctctggctttgagtgtggtccaggaagaaaatgtggtgaagaaaagaacacgggtcacagtgtcccagctggatattgtgaaaggggtggaggagttgagaacagagcagttgggactcagggaagggacttgcagcagatgaattctctaggcagacaaaacagacctggatgtttttcccctcttctttgagtcatgttcatgtgagtttgtctgtctgtgtgtgtgtgtgtgtgtgtgtgtgtgtgtgtgtgtgtgtcagagagagagagagagagagagagatggagtgcggaggcttgggtgagagcacaagctggagaagtcttgagtcagagagcttacaatggtataagacatctcttgggagccctcagtgactccatggagaccatttctttctctctctctcgctgtctctctctaacacacacacacacacacacgacctcatgggggaggaccaaggaagtacggggaagggggaggaaacaaaaggctgaaagaccaaaaatcagaggttggggaagaggctagcagaggccacctccttgtcaaccctgtttttctccctcttattgttccctacagattgcgagagagctgcatcagttcacttttgacctgctaatcaagtcacacatggtgagcgtggactttccggaaatgatggcagagatcatctctgtgcaagtgcccaagatcctttctgggaaagtcaagcccatctatttccacacccagtgaagcattggaaaccctatttccccaccccagctcatgccccctttcagatgtcttctgcctgttataactctgcactactcctctgcagtgccttggggaatttcctctattgatgtacagtctgtcatgaacatgttcctgaattctatttgctgggctttttttttctctttctctcctttctttttcttcttccctccctatctaaccctcccatggcaccttcagactttgcttcccattgtggctcctatctgtgttttgaatggtgttgtatgcctttaaatctgtgatgatcctcatatggcccagtgtcaagttgtgcttgtttacagcactactctgtgccagccacacaaacgtttacttatcttatgccacgggaagtttagagagctaagattatctggggaaatcaaaacaaaaacaagcaaacaaaaaaaaaaagcaaaaacaaaacaaaaaataagccaaaaaaccttgctagtgttttttcctcaaaaataaataaataaataaataaatacgtacatacatacacacatacatacaaacatatagaaatccccaaagaggccaatagtgacgagaaggtgaaaattgcaggcccatggggagttactgattttttcatctcctccctccacgggagactttattttctgccaatggctattgccattagagggcagagtgaccccagagctgagttgggcaggggggtggacagagaggagaggacaaggagggcaatggagcatcagtacctgcccacagccttggtccctgggggctagactgctcaactgtggagcaattcattatactgaaaatgtgcttgttgttgaaaatttgtctgcatgttaatgcctcacccccaaacccttttctctctcactctctgcctccaacttcagattgactttcaatagtttttctaagacctttgaactgaatgttctcttcagccaaaacttggcgacttccacagaaaagtctgaccactgagaagaaggagagcagagatttaaccctttgtaaggccccatttggatccaggtctgctttctcatgtgtgagtcagggaggagctggagccagaggagaagaaaatgatagcttggctgttctcctgcttaggacactgactgaatagttaaactctcactgccactaccttttccccacctttaaaagacctgaatgaagttttctgccaaactccgtgaagccacaagcaccttatgtcctcccttcagtgttttgtgggcctgaatttcatcacactgcatttcagccatggtcatcaagcctgtttgcttcttttgggcatgttcacagattctctgttaagagcccccaccaccaagaaggttagcaggccaacagctctgacatctatctgtagatgccagtagtcacaaagatttcttaccaactctcagatcgctggagcccttagacaaactggaaagaaggcatcaaagggatcaggcaagctgggcgtcttgcccttgtcccccagagatgataccctcccagcaagtggagaagttctcacttccttctttagagcagctaaaggggctacccagatcagggttgaagagaaaactcaattaccagggtgggaagaatgaaggcactagaaccagaaaccctgcaaatgctcttcttgtcacccagcatatccacctgcagaagtcatgagaagagagaaggaacaaagaggagactctgactactgaattaaaatcttcagcggcaaagcctaaagccagatggacaccatctggtgagtttactcatcatcctcctctgctgctgattctgggctctgacattgcccatactcactcagattccccacctttgttgctgcctcttagtcagagggaggccaaaccattgagactttctacagaaccatggcttctttcggaaaggtctggttggtgtggctccaatactttgccacccatgaactcagggtgtgccctgggacactggttttatatagtcttttggcacacctgtgttctgttgacttcgttcttcaagcccaagtgcaagggaaaatgtccacctactttctcatcttggcctctgcctccttacttagctcttaatctcatctgttgaactcaagaaatcaagggccagtcatcaagctgcccattttaattgattcactctgtttgttgagaggatagtttctgagtgacatgatatgatccacaagggtttccttccctgatttctgcattgatattaatagccaaacgaacttcaaaacagctttaaataacaagggagaggggaacctaagatgagtaatatgccaatccaagactgctggagaaaactaaagctgacaggttccctttttggggtgggatagacatgttctggttttctttattattacacaatctggctcatgtacaggatcacttttagctgttttaaacagaaaaaaatatccaccactcttttcagttacactaggttacattttaataggtcctttacatctgttttggaatgattttcatcttttgtgatacacagattgaattatatcattttcatatctctccttgtaaatactagaagctctcctttacatttctctatcaaatttttcatctttatgggtttcccaattgtgactcttgtcttcatgaatatatgtttttcatttgcaaaagccaaaaatcagtgaaacagcagtgtaattaaaagcaacaactggattactccaaatttccaaatgacaaaactagggaaaaatagcctacacaagcctttaggcctactctttctgtgcttgggtttgagtgaacaaaggagattttagcttggctctgttctcccatggatgaaaggaggaggattttttttttcttttggccattgatgttctagccaatgtaattgacagaagtctcattttgcatgcgctctgctctacaaacagagttggtatggttggtatactgtactcacctgtgagggactggccactcagacccacttagctggtgagctagaagatgaggatcactcactggaaaagtcacaaggaccatctccaaacaagttggcagtgctcgatgtggacgaagagtgaggaagagaaaaagaaggagcaccagggagaaggctccgtctgtgctgggcagcagacagctgccaggatcacgaactctgtagtcaaagaaaagagtcgtgtggcagtttcagctctcgttcattgggcagctcgcctaggcccagcctctgagctgacatgggagttgttggattctttgtttcatagctttttctatgccataggcaatattgttgttcttggaaagtttattatttttttaactcccttactctgagaaagggatattttgaaggactgtcatatatctttgaaaaaagaaaatctgtaatacatatatttttatgtatgttcactggcactaaaaaatatagagagcttcattctgtcctttgggtagttgctgaggtaattgtccaggttgaaaaataatgtgctgatgctagagtccctctctgtccatactctacttctaaatacatataggcatacatagcaagttttatttgacttgtactttaagagaaaatatgtccaccatccacatgatgcacaaatgagctaacattgagcttcaagtagcttctaagtgtttgtttcattaggcacagcacagatgtggcctttccccccttctctcccttgatatctggcagggcataaaggcccaggccacttcctctgccccttcccagccctgcaccaaagctgcatttcaggagactctctccagacagcccagtaactacccgagcatggcccctgcatagccctggaaaaataagaggctgactgtctacgaattatcttgtgccagttgcccaggtgagagggcactgggccaagggagtggttttcatgtttgacccactacaaggggtcatgggaatcaggaatgccaaagcaccagatcaaatccaaaacttaaagtcaaaataagccattcagcatgttcagtttcttggaaaaggaagtttctacccctgatgcctttgtaggcagatctgttctcaccattaatctttttgaaaatcttttaaagcagtttttaaaaagagagatgaaagcatcacattatataaccaaagattacattgtacctgctaagataccaaaattcataagggcagggggggagcaagcattagtgcctctttgataagctgtccaaagacagactaaaggactctgctggtgactgacttataagagctttgtgggtttttttttccctaataatatacatgtttagaagaattgaaaataatttcgggaaaatgggattatgggtccttcactaagtgattttataagcagaactggctttccttttctctagtagttgctgagcaaattgttgaagctccatcattgcatggttggaaatggagctgttcttagccactgtgtttgctagtgcccatgttagcttatctgaagatgtgaaacccttgctgataagggagcatttaaagtactagattttgcactagagggacagcaggcagaaatccttatttctgcccactttggatggcacaaaaagttatctgcagttgaaggcagaaagttgaaatacattgtaaatgaatatttgtatccatgtttcaaaattgaaatatatatatatatatatatatatatatatatatatatatagtgtgtgtgtgtgttctgatagctttaactttctctgcatctttatatttggttccagatcacacctgatgccatgtacttgtgagagaggatgcagttttgttttggaagctctctcagaacaaacaagacacctggattgatcagttaactaaaagttttctcccctattgggtttgacccacaggtcctgtgaaggagcagagggataaaaagagtagaggacatgatacattgtactttactagttcaagacagatgaatgtggaaagcataaaaactcaatggaactgactgagatttaccacagggaaggcccaaacttggggccaaaagcctacccaagtgattgaccagtggccccctaatgggacctgagctgttggaagaagagaactgttccttggtcttcaccatccttgtgagagaagggcagtttcctgcattggaacctggagcaagcgctctatctttcacacaaattccctcacctgagattgaggtgctcttgttactgggtgtctgtgtgctgtaattctggttttggatatgttctgtaaagattttgacaaatgaaaatgtgtttttctctgttaaaacttgtcagagtactagaagttgtatctctgtaggtgcaggtccatttctgcccacaggtagggtgtttttctttgattaagagattgacacttctgttgcctaggacctcccaactcaaccatttctaggtgaaggcagaaaaatccacattagttactcctcttcagacatttcagctgagataacaaatcttttggaattttttcacccatagaaagagtggtagatatttgaatttagcaggtggagtttcatagtaaaaacagcttttgactcagctttgatttatcctcatttgatttggccagaaagtaggtaatatgcattgattggcttctgattccaattcagtatagcaaggtgctaggttttttcctttccccacctgtctcttagcctggggaattaaatgagaagccttagaatgggtggcccttgtgacctgaaacacttcccacataagctacttaacaagattgtcatggagctgcagattccattgcccaccaaagactagaacacacacatatccatacaccaaaggaaagacaattctgaaatgctgtttctctggtggttccctctctggctgctgcctcacagtatgggaacctgtactctgcagaggtgacaggccagatttgcattatctcacaaccttagcccttggtgctaactgtcctacagtgaagtgcctggggggttgtcctatcccataagccacttggatgctgacagcagccaccatcagaatgacccacgcaaaaaaaagaaaaaaaaaattaaaaagtcccctcacaacccagtgacacctttctgctttcctctagactggaacattgattagggagtgcctcagacatgacattcttgtgctgtccttggaattaatctggcagcaggagggagcagactatgtaaacagagataaaaattaattttcaatattgaaggaaaaaagaaataagaagagagagagaaagaaagcatcacacaaagattttcttaaaagaaacaattttgcttgaaatctctttagatggggctcatttctcacggtggcacttggcctccactgggcagcaggaccagctccaagcgctagtgttctgttctctttttgtaatcttggaatcttttgttgctctaaatacaattaaaaatggcagaaacttgtttgttggactacatgtgtgactttgggtctgtctctgcctctgctttcagaaatgtcatccattgtgtaaaatattggcttactggtctgccagctaaaacttggccacatcccctgttatggctgcaggatcgagttattgttaacaaagagacccaagaaaagctgctaatgtcctcttatcattgttgttaatttgttaaaacataaagaaatctaaaatttcagatgaatgtcatcagagttcttttaattagctctttttattggctgtttttattgaagtcaagagttggtatcatgcccggttgcgttttatgctattttgattttcatatatttttaaaagtctttgcacaagggttacaaatttgccctgtggtggccttagcataagctgacctgggaccaccaaaataacaaggaatttgggctagaaagcacagatggacactggtgacccatcacaacttctcttgaaaaaccccaaacttgtcagctggggaaaagccacacaaagcccagctgcccaccttcacatccttatccttgtaggagcataaaatggtgtcatcactgcccagttctaaccaagcttcagttaaagaatgggtaccttcacatcttcactatttttcaggggccttaccgtccttgaccacccaagtaaaatctaaatcagccttcttttgggttcttcagttcaagcaaggcctcttcttgtggcctctcagtattaatatttatgaggttgcagattgaatttttgggcctgagatacaagccatcaatgaggtgtgacaaagcatgtcaatgaataataagaaaattatctattcttccatatcctcccctgtaataagggttgtcagaatgccttctttctgggctgggttgaggattcagtgagaacatatgtgacacagctggtgggctattaagctctggctttgctccctgttaaaatgccagaacccttgagagggatcccacattgagccatgtttatcactgaccaccttagaatggatggatttctcagatttttcctgagatcaatgcttgatggagaggagaggagaacaatagattcttgggatgtgtgttatgcatgtgtttaagtaagagacagagagtatgtttatttgcaggttgtgtgtgtaaagtcagagcctgcctccagaggatcttctctaaccaccattgcttaggtcctgttcgtttgcatctacagcgaatgaccttacagccatctgacttggcttcactcaccactcagctcctgcctaaacagacgaggtggttagcatccaccataagttttccaaggagtagcaaagcacaaaggacacctattgggttgaaaagagcctagaggcatgagtcctgtgtgtgacttgttcatagtcatgcagctagtgtatagctaggattctcccctgctgatttactatgtgacactaggcagcaatctgcccttgctggacctcggttttctaatctgtaaaatgtgtggagtaaaactacatgagatgggaagtcccttctagtgcagatgccatggttattgaaaactgcagcaacatctttcttaatcgtaaggggaaagaaaaagaccatttactactcctagaacagttttggagctagaatattcacatttgcactcaataattatttacaaaacaactagtgtggagagggtcaaaacaacagctgagtcctgtgtaatagatattgtcaaccccttgatggatgaggaaggggctcaaagggaa

SEQ ID NO: 2 - RNA, 6489 nt, Homo sapiens
  source 1..6489: mol_type = mRNA
aggtacctttggggctggctttctcaaggaagcccagctccctgtgattgagaatgaagtgtgcaatcgctatgactgggattgggacacactttctgggcactgctggccagtcccaaaatggaacataaggaagtggttcttctacttcttttatttctgaaatcagcagcacctgagcaaagccatgtggtccaggattgctaccatggtgatggacagagttatcgaggcacgtactccaccactgtcacaggaaggacctgccaagcttggtcatctatgacaccacatcaacataataggaccacagaaaactacccaaatgctggcttgatcatgaactactgcaggaatccagatgctgtggcagctccttattgttatacgagggatcccggtgtcaggtgggagtactgcaacctgacgcaatgctcagacgcagaagggactgccgtcgcgcctccgactgttaccccggttccaagcctagaggctccttccgaacaagcaccgactgagcaaaggcctggggtgcaggagtgctaccatggtaatggacagagttatcgaggcacatactccaccactgtcacaggaagaacctgccaagcttggtcatctatgacaccacactcgcatagtcggaccccagaatactacccaaatgctggcttgatcatgaactactgcaggaatccagatgctgtggcagctccttattgttatacgagggatcccggtgtcaggtgggagtactgcaacctgacgcaatgctcagacgcagaagggactgccgtcgcgcctccgactgttaccccggttccaagcctagaggctccttccgaacaagcaccgactgagcaaaggcctggggtgcaggagtgctaccatggtaatggacagagttatcgaggcacatactccaccactgtcacaggaagaacctgccaagcttggtcatctatgacaccacactcgcatagtcggaccccagaatactacccaaatgctggcttgatcatgaactactgcaggaatccagatgctgtggcagctccttattgttatacgagggatcccggtgtcaggtgggagtactgcaacctgacgcaatgctcagacgcagaagggactgccgtcgcgcctccgactgttaccccggttccaagcctagaggctccttccgaacaagcaccgactgagcagaggcctggggtgcaggagtgctaccacggtaatggacagagttatcgaggcacatactccaccactgtcactggaagaacctgccaagcttggtcatctatgacaccacactcgcatagtcggaccccagaatactacccaaatgctggcttgatcatgaactactgcaggaatccagatgctgtggcagctccttattgttatacgagggatcccggtgtcaggtgggagtactgcaacctgacgcaatgctcagacgcagaagggactgccgtcgcgcctccgactgttaccccggttccaagcctagaggctccttccgaacaagcaccgactgagcaaaggcctggggtgcaggagtgctaccatggtaatggacagagttatcgaggcacatactccaccactgtcacaggaagaacctgccaagcttggtcatctatgacaccacactcgcatagtcggaccccagaatactacccaaatgctggcttgatcatgaactactgcaggaatccagatgctgtggcagctccttattgttatacgagggatcccggtgtcaggtgggagtactgcaacctgacgcaatgctcagacgcagaagggactgccgtcgcgcctccgactgttaccccggttccaagcctagaggctccttccgaacaagcaccgactgagcaaaggcctggggtgcaggagtgctaccatggtaatggacagagttatcgaggcacatactccaccactgtcacaggaagaacctgccaagcttggtcatctatgacaccacactcgcatagtcggaccccagaatactacccaaatgctggcttgatcatgaactactgcaggaatccagatgctgtggcagctccttattgttatacgagggatcccggtgtcaggtgggagtactgcaacctgacgcaatgctcagacgcagaagggactgccgtcgcgcctccgactgttaccccggttccaagcctagaggctccttccgaacaagcaccgactgagcaaaggcctggggtgcaggagtgctaccatggtaatggacagagttatcgaggcacatactccaccactgtcacaggaagaacctgccaagcttggtcatctatgacaccacactcgcatagtcggaccccagaatactacccaaatgctggcttgatcatgaactactgcaggaatccagatgctgtggcagctccttattgttatacgagggatcccggtgtcaggtgggagtactgcaacctgacgcaatgctcagacgcagaagggactgccgtcgcgcctccgactgttaccccggttccaagcctagaggctccttccgaacaagcaccgactgagcagaggcctggggtgcaggagtgctaccacggtaatggacagagttatcgaggcacatactccaccactgtcactggaagaacctgccaagcttggtcatctatgacaccacactcgcatagtcggaccccagaatactacccaaatgctggcttgatcatgaactactgcaggaatccagatcctgtggcagccccttattgttatacgagggatcccagtgtcaggtgggagtactgcaacctgacacaatgctcagacgcagaagggactgccgtcgcgcctccaactattaccccgattccaagcctagaggctccttctgaacaagcaccaactgagcaaaggcctggggtgcaggagtgctaccacggaaatggacagagttatcaaggcacatacttcattactgtcacaggaagaacctgccaagcttggtcatctatgacaccacactcgcatagtcggaccccagcatactacccaaatgctggcttgatcaagaactactgccgaaatccagatcctgtggcagccccttggtgttatacaacagatcccagtgtcaggtgggagtactgcaacctgacacgatgctcagatgcagaatggactgccttcgtccctccgaatgttattctggctccaagcctagaggctttttttgaacaagcactgactgaggaaacccccggggtacaggactgctactaccattatggacagagttaccgaggcacatactccaccactgtcacaggaagaacttgccaagcttggtcatctatgacaccacaccagcatagtcggaccccagaaaactacccaaatgctggcctgaccaggaactactgcaggaatccagatgctgagattcgcccttggtgttacaccatggatcccagtgtcaggtgggagtactgcaacctgacacaatgcctggtgacagaatcaagtgtccttgcaactctcacggtggtcccagatccaagcacagaggcttcttctgaagaagcaccaacggagcaaagccccggggtccaggattgctaccatggtgatggacagagttatcgaggctcattctctaccactgtcacaggaaggacatgtcagtcttggtcctctatgacaccacactggcatcagaggacaacagaatattatccaaatggtggcctgaccaggaactactgcaggaatccagatgctgagattagtccttggtgttataccatggatcccaatgtcagatgggagtactgcaacctgacacaatgtccagtgacagaatcaagtgtccttgcgacgtccacggctgtttctgaacaagcaccaacggagcaaagccccacagtccaggactgctaccatggtgatggacagagttatcgaggctcattctccaccactgttacaggaaggacatgtcagtcttggtcctctatgacaccacactggcatcagagaaccacagaatactacccaaatggtggcctgaccaggaactactgcaggaatccagatgctgagattcgcccttggtgttataccatggatcccagtgtcagatgggagtactgcaacctgacgcaatgtccagtgatggaatcaactctcctcacaactcccacggtggtcccagttccaagcacagagcttccttctgaagaagcaccaactgaaaacagcactggggtccaggactgctaccgaggtgatggacagagttatcgaggcacactctccaccactatcacaggaagaacatgtcagtcttggtcgtctatgacaccacattggcatcggaggatcccattatactatccaaatgctggcctgaccaggaactactgcaggaatccagatgctgagattcgcccttggtgttacaccatggatcccagtgtcaggtgggagtactgcaacctgacacgatgtccagtgacagaatcgagtgtcctcacaactcccacagtggccccggttccaagcacagaggctccttctgaacaagcaccacctgagaaaagccctgtggtccaggattgctaccatggtgatggacggagttatcgaggcatatcctccaccactgtcacaggaaggacctgtcaatcttggtcatctatgataccacactggcatcagaggaccccagaaaactacccaaatgctggcctgaccgagaactactgcaggaatccagattctgggaaacaaccctggtgttacacaaccgatccgtgtgtgaggtgggagtactgcaatctgacacaatgctcagaaacagaatcaggtgtcctagagactcccactgttgttccagttccaagcatggaggctcattctgaagcagcaccaactgagcaaacccctgtggtccggcagtgctaccatggtaatggccagagttatcgaggcacattctccaccactgtcacaggaaggacatgtcaatcttggtcatccatgacaccacaccggcatcagaggaccccagaaaactacccaaatgatggcctgacaatgaactactgcaggaatccagatgccgatacaggcccttggtgttttaccatggaccccagcatcaggtgggagtactgcaacctgacgcgatgctcagacacagaagggactgtggtcgctcctccgactgtcatccaggttccaagcctagggcctccttctgaacaagactgtatgtttgggaatgggaaaggataccggggcaagaaggcaaccactgttactgggacgccatgccaggaatgggctgcccaggagccccatagacacagcacgttcattccagggacaaataaatgggcaggtctggaaaaaaattactgccgtaaccctgatggtgacatcaatggtccctggtgctacacaatgaatccaagaaaactttttgactactgtgatatccctctctgtgcatcctcttcatttgattgtgggaagcctcaagtggagccgaagaaatgtcctggaagcattgtaggggggtgtgtggcccacccacattcctggccctggcaagtcagtctcagaacaaggtttggaaagcacttctgtggaggcaccttaatatccccagagtgggtgctgactgctgctcactgcttgaagaagtcctcaaggccttcatcctacaaggtcatcctgggtgcacaccaagaagtgaacctcgaatctcatgttcaggaaatagaagtgtctaggctgttcttggagcccacacaagcagatattgccttgctaaagctaagcaggcctgccgtcatcactgacaaagtaatgccagcttgtctgccatccccagactacatggtcaccgccaggactgaatgttacatcactggctggggagaaacccaaggtacctttgggactggccttctcaaggaagcccagctccttgttattgagaatgaagtgtgcaatcactataagtatatttgtgctgagcatttggccagaggcactgacagttgccagggtgacagtggagggcctctggtttgcttcgagaaggacaaatacattttacaaggagtcacttcttggggtcttggctgtgcacgccccaataagcctggtgtctatgctcgtgtttcaaggtttgttacttggattgagggaatgatgagaaataattaattggacgggagacagagtgaagcatcaacctacttagaagctgaaacgtgggtaaggatttagcatgctggaaataatagacagcaatcaaacgaagacactgttcccagctaccagctatgccaaaccttggcatttttggtatttttgtgtataagcttttaaggtctgactgacaaattctgtattaaggtgtcatagctatgacatttgttaaaaataaactctgcacttattttgatttga

SEQ ID NO: 3 - RNA, 14121 nt, Homo sapiens
  source 1..14121: mol_type = mRNA
attcccaccgggacctgcggggctgagtgcccttctcggttgctgccgctgaggagcccgcccagccagccagggccgcgaggccgaggccaggccgcagcccaggagccgccccaccgcagctggcgatggacccgccgaggcccgcgctgctggcgctgctggcgctgcctgcgctgctgctgctgctgctggcgggcgccagggccgaagaggaaatgctggaaaatgtcagcctggtctgtccaaaagatgcgacccgattcaagcacctccggaagtacacatacaactatgaggctgagagttccagtggagtccctgggactgctgattcaagaagtgccaccaggatcaactgcaaggttgagctggaggttccccagctctgcagcttcatcctgaagaccagccagtgcaccctgaaagaggtgtatggcttcaaccctgagggcaaagccttgctgaagaaaaccaagaactctgaggagtttgctgcagccatgtccaggtatgagctcaagctggccattccagaagggaagcaggttttcctttacccggagaaagatgaacctacttacatcctgaacatcaagaggggcatcatttctgccctcctggttcccccagagacagaagaagccaagcaagtgttgtttctggataccgtgtatggaaactgctccactcactttaccgtcaagacgaggaagggcaatgtggcaacagaaatatccactgaaagagacctggggcagtgtgatcgcttcaagcccatccgcacaggcatcagcccacttgctctcatcaaaggcatgacccgccccttgtcaactctgatcagcagcagccagtcctgtcagtacacactggacgctaagaggaagcatgtggcagaagccatctgcaaggagcaacacctcttcctgcctttctcctacaacaataagtatgggatggtagcacaagtgacacagactttgaaacttgaagacacaccaaagatcaacagccgcttctttggtgaaggtactaagaagatgggcctcgcatttgagagcaccaaatccacatcacctccaaagcaggccgaagctgttttgaagactctccaggaactgaaaaaactaaccatctctgagcaaaatatccagagagctaatctcttcaataagctggttactgagctgagaggcctcagtgatgaagcagtcacatctctcttgccacagctgattgaggtgtccagccccatcactttacaagccttggttcagtgtggacagcctcagtgctccactcacatcctccagtggctgaaacgtgtgcatgccaacccccttctgatagatgtggtcacctacctggtggccctgatccccgagccctcagcacagcagctgcgagagatcttcaacatggcgagggatcagcgcagccgagccaccttgtatgcgctgagccacgcggtcaacaactatcataagacaaaccctacagggacccaggagctgctggacattgctaattacctgatggaacagattcaagatgactgcactggggatgaagattacacctatttgattctgcgggtcattggaaatatgggccaaaccatggagcagttaactccagaactcaagtcttcaatcctcaaatgtgtccaaagtacaaagccatcactgatgatccagaaagctgccatccaggctctgcggaaaatggagcctaaagacaaggaccaggaggttcttcttcagactttccttgatgatgcttctccgggagataagcgactggctgcctatcttatgttgatgaggagtccttcacaggcagatattaacaaaattgtccaaattctaccatgggaacagaatgagcaagtgaagaactttgtggcttcccatattgccaatatcttgaactcagaagaattggatatccaagatctgaaaaagttagtgaaagaagctctgaaagaatctcaacttccaactgtcatggacttcagaaaattctctcggaactatcaactctacaaatctgtttctcttccatcacttgacccagcctcagccaaaatagaagggaatcttatatttgatccaaataactaccttcctaaagaaagcatgctgaaaactaccctcactgcctttggatttgcttcagctgacctcatcgagattggcttggaaggaaaaggctttgagccaacattggaagctctttttgggaagcaaggatttttcccagacagtgtcaacaaagctttgtactgggttaatggtcaagttcctgatggtgtctctaaggtcttagtggaccactttggctataccaaagatgataaacatgagcaggatatggtaaatggaataatgctcagtgttgagaagctgattaaagatttgaaatccaaagaagtcccggaagccagagcctacctccgcatcttgggagaggagcttggttttgccagtctccatgacctccagctcctgggaaagctgcttctgatgggtgcccgcactctgcaggggatcccccagatgattggagaggtcatcaggaagggctcaaagaatgacttttttcttcactacatcttcatggagaatgcctttgaactccccactggagctggattacagttgcaaatatcttcatctggagtcattgctcccggagccaaggctggagtaaaactggaagtagccaacatgcaggctgaactggtggcaaaaccctccgtgtctgtggagtttgtgacaaatatgggcatcatcattccggacttcgctaggagtggggtccagatgaacaccaacttcttccacgagtcgggtctggaggctcatgttgccctaaaagctgggaagctgaagtttatcattccttccccaaagagaccagtcaagctgctcagtggaggcaacacattacatttggtctctaccaccaaaacggaggtgatcccacctctcattgagaacaggcagtcctggtcagtttgcaagcaagtctttcctggcctgaattactgcacctcaggcgcttactccaacgccagctccacagactccgcctcctactatccgctgaccggggacaccagattagagctggaactgaggcctacaggagagattgagcagtattctgtcagcgcaacctatgagctccagagagaggacagagccttggtggataccctgaagtttgtaactcaagcagaaggtgcgaagcagactgaggctaccatgacattcaaatataatcggcagagtatgaccttgtccagtgaagtccaaattccggattttgatgttgacctcggaacaatcctcagagttaatgatgaatctactgagggcaaaacgtcttacagactcaccctggacattcagaacaagaaaattactgaggtcgccctcatgggccacctaagttgtgacacaaaggaagaaagaaaaatcaagggtgttatttccataccccgtttgcaagcagaagccagaagtgagatcctcgcccactggtcgcctgccaaactgcttctccaaatggactcatctgctacagcttatggctccacagtttccaagagggtggcatggcattatgatgaagagaagattgaatttgaatggaacacaggcaccaatgtagataccaaaaaaatgacttccaatttccctgtggatctctccgattatcctaagagcttgcatatgtatgctaatagactcctggatcacagagtccctgaaacagacatgactttccggcacgtgggttccaaattaatagttgcaatgagctcatggcttcagaaggcatctgggagtcttccttatacccagactttgcaagaccacctcaatagcctgaaggagttcaacctccagaacatgggattgccagacttccacatcccagaaaacctcttcttaaaaagcgatggccgggtcaaatataccttgaacaagaacagtttgaaaattgagattcctttgccttttggtggcaaatcctccagagatctaaagatgttagagactgttaggacaccagccctccacttcaagtctgtgggattccatctgccatctcgagagttccaagtccctacttttaccattcccaagttgtatcaactgcaagtgcctctcctgggtgttctagacctctccacgaatgtctacagcaacttgtacaactggtccgcctcctacagtggtggcaacaccagcacagaccatttcagccttcgggctcgttaccacatgaaggctgactctgtggttgacctgctttcctacaatgtgcaaggatctggagaaacaacatatgaccacaagaatacgttcacactatcatgtgatgggtctctacgccacaaatttctagattcgaatatcaaattcagtcatgtagaaaaacttggaaacaacccagtctcaaaaggtttactaatattcgatgcatctagttcctggggaccacagatgtctgcttcagttcatttggactccaaaaagaaacagcatttgtttgtcaaagaagtcaagattgatgggcagttcagagtctcttcgttctatgctaaaggcacatatggcctgtcttgtcagagggatcctaacactggccggctcaatggagagtccaacctgaggtttaactcctcctacctccaaggcaccaaccagataacaggaagatatgaagatggaaccctctccctcacctccacctctgatctgcaaagtggcatcattaaaaatactgcttccctaaagtatgagaactacgagctgactttaaaatctgacaccaatgggaagtataagaactttgccacttctaacaagatggatatgaccttctctaagcaaaatgcactgctgcgttctgaatatcaggctgattacgagtcattgaggttcttcagcctgctttctggatcactaaattcccatggtcttgagttaaatgctgacatcttaggcactgacaaaattaatagtggtgctcacaaggcgacactaaggattggccaagatggaatatctaccagtgcaacgaccaacttgaagtgtagtctcctggtgctggagaatgagctgaatgcagagcttggcctctctggggcatctatgaaattaacaacaaatggccgcttcagggaacacaatgcaaaattcagtctggatgggaaagccgccctcacagagctatcactgggaagtgcttatcaggccatgattctgggtgtcgacagcaaaaacattttcaacttcaaggtcagtcaagaaggacttaagctctcaaatgacatgatgggctcatatgctgaaatgaaatttgaccacacaaacagtctgaacattgcaggcttatcactggacttctcttcaaaacttgacaacatttacagctctgacaagttttataagcaaactgttaatttacagctacagccctattctctggtaactactttaaacagtgacctgaaatacaatgctctggatctcaccaacaatgggaaactacggctagaacccctgaagctgcatgtggctggtaacctaaaaggagcctaccaaaataatgaaataaaacacatctatgccatctcttctgctgccttatcagcaagctataaagcagacactgttgctaaggttcagggtgtggagtttagccatcggctcaacacagacatcgctgggctggcttcagccattgacatgagcacaaactataattcagactcactgcatttcagcaatgtcttccgttctgtaatggccccgtttaccatgaccatcgatgcacatacaaatggcaatgggaaactcgctctctggggagaacatactgggcagctgtatagcaaattcctgttgaaagcagaacctctggcatttactttctctcatgattacaaaggctccacaagtcatcatctcgtgtctaggaaaagcatcagtgcagctcttgaacacaaagtcagtgccctgcttactccagctgagcagacaggcacctggaaactcaagacccaatttaacaacaatgaatacagccaggacttggatgcttacaacactaaagataaaattggcgtggagcttactggacgaactctggctgacctaactctactagactccccaattaaagtgccacttttactcagtgagcccatcaatatcattgatgctttagagatgagagatgccgttgagaagccccaagaatttacaattgttgcttttgtaaagtatgataaaaaccaagatgttcactccattaacctcccattttttgagaccttgcaagaatattttgagaggaatcgacaaaccattatagttgtagtggaaaacgtacagagaaacctgaagcacatcaatattgatcaatttgtaagaaaatacagagcagccctgggaaaactcccacagcaagctaatgattatctgaattcattcaattgggagagacaagtttcacatgccaaggagaaactgactgctctcacaaaaaagtatagaattacagaaaatgatatacaaattgcattagatgatgccaaaatcaactttaatgaaaaactatctcaactgcagacatatatgatacaatttgatcagtatattaaagatagttatgatttacatgatttgaaaatagctattgctaatattattgatgaaatcattgaaaaattaaaaagtcttgatgagcactatcatatccgtgtaaatttagtaaaaacaatccatgatctacatttgtttattgaaaatattgattttaacaaaagtggaagtagtactgcatcctggattcaaaatgtggatactaagtaccaaatcagaatccagatacaagaaaaactgcagcagcttaagagacacatacagaatatagacatccagcacctagctggaaagttaaaacaacacattgaggctattgatgttagagtgcttttagatcaattgggaactacaatttcatttgaaagaataaatgatgttcttgagcatgtcaaacactttgttataaatcttattggggattttgaagtagctgagaaaatcaatgccttcagagccaaagtccatgagttaatcgagaggtatgaagtagaccaacaaatccaggttttaatggataaattagtagagttgacccaccaatacaagttgaaggagactattcagaagctaagcaatgtcctacaacaagttaagataaaagattactttgagaaattggttggatttattgatgatgctgtgaagaagcttaatgaattatcttttaaaacattcattgaagatgttaacaaattccttgacatgttgataaagaaattaaagtcatttgattaccaccagtttgtagatgaaaccaatgacaaaatccgtgaggtgactcagagactcaatggtgaaattcaggctctggaactaccacaaaaagctgaagcattaaaactgtttttagaggaaaccaaggccacagttgcagtgtatctggaaagcctacaggacaccaaaataaccttaatcatcaattggttacaggaggctttaagttcagcatctttggctcacatgaaggccaaattccgagagactctagaagatacacgagaccgaatgtatcaaatggacattcagcaggaacttcaacgatacctgtctctggtaggccaggtttatagcacacttgtcacctacatttctgattggtggactcttgctgctaagaaccttactgactttgcagagcaatattctatccaagattgggctaaacgtatgaaagcattggtagagcaagggttcactgttcctgaaatcaagaccatccttgggaccatgcctgcctttgaagtcagtcttcaggctcttcagaaagctaccttccagacacctgattttatagtccccctaacagatttgaggattccatcagttcagataaacttcaaagacttaaaaaatataaaaatcccatccaggttttccacaccagaatttaccatccttaacaccttccacattccttcctttacaattgactttgtcgaaatgaaagtaaagatcatcagaaccattgaccagatgcagaacagtgagctgcagtggcccgttccagatatatatctcagggatctgaaggtggaggacattcctctagcgagaatcaccctgccagacttccgtttaccagaaatcgcaattccagaattcataatcccaactctcaaccttaatgattttcaagttcctgaccttcacataccagaattccagcttccccacatctcacacacaattgaagtacctacttttggcaagctatacagtattctgaaaatccaatctcctcttttcacattagatgcaaatgctgacatagggaatggaaccacctcagcaaacgaagcaggtatcgcagcttccatcactgccaaaggagagtccaaattagaagttctcaattttgattttcaagcaaatgcacaactctcaaaccctaagattaatccgctggctctgaaggagtcagtgaagttctccagcaagtacctgagaacggagcatgggagtgaaatgctgttttttggaaatgctattgagggaaaatcaaacacagtggcaagtttacacacagaaaaaaatacactggagcttagtaatggagtgattgtcaagataaacaatcagcttaccctggatagcaacactaaatacttccacaaattgaacatccccaaactggacttctctagtcaggctgacctgcgcaacgagatcaagacactgttgaaagctggccacatagcatggacttcttctggaaaagggtcatggaaatgggcctgccccagattctcagatgagggaacacatgaatcacaaattagtttcaccatagaaggacccctcacttcctttggactgtccaataagatcaatagcaaacacctaagagtaaaccaaaacttggtttatgaatctggctccctcaacttttctaaacttgaaattcaatcacaagtcgattcccagcatgtgggccacagtgttctaactgctaaaggcatggcactgtttggagaagggaaggcagagtttactgggaggcatgatgctcatttaaatggaaaggttattggaactttgaaaaattctcttttcttttcagcccagccatttgagatcacggcatccacaaacaatgaagggaatttgaaagttcgttttccattaaggttaacagggaagatagacttcctgaataactatgcactgtttctgagtcccagtgcccagcaagcaagttggcaagtaagtgctaggttcaatcagtataagtacaaccaaaatttctctgctggaaacaacgagaacattatggaggcccatgtaggaataaatggagaagcaaatctggatttcttaaacattcctttaacaattcctgaaatgcgtctaccttacacaataatcacaactcctccactgaaagatttctctctatgggaaaaaacaggcttgaaggaattcttgaaaacgacaaagcaatcatttgatttaagtgtaaaagctcagtataagaaaaacaaacacaggcattccatcacaaatcctttggctgtgctttgtgagtttatcagtcagagcatcaaatcctttgacaggcattttgaaaaaaacagaaacaatgcattagattttgtcaccaaatcctataatgaaacaaaaattaagtttgataagtacaaagctgaaaaatctcacgacgagctccccaggacctttcaaattcctggatacactgttccagttgtcaatgttgaagtgtctccattcaccatagagatgtcggcattcggctatgtgttcccaaaagcagtcagcatgcctagtttctccatcctaggttctgacgtccgtgtgccttcatacacattaatcctgccatcattagagctgccagtccttcatgtccctagaaatctcaagctttctcttccacatttcaaggaattgtgtaccataagccatatttttattcctgccatgggcaatattacctatgatttctcctttaaatcaagtgtcatcacactgaataccaatgctgaactttttaaccagtcagatattgttgctcatctcctttcttcatcttcatctgtcattgatgcactgcagtacaaattagagggcaccacaagattgacaagaaaaaggggattgaagttagccacagctctgtctctgagcaacaaatttgtggagggtagtcataacagtactgtgagcttaaccacgaaaaatatggaagtgtcagtggcaaaaaccacaaaagccgaaattccaattttgagaatgaatttcaagcaagaacttaatggaaataccaagtcaaaacctactgtctcttcctccatggaatttaagtatgatttcaattcttcaatgctgtactctaccgctaaaggagcagttgaccacaagcttagcttggaaagcctcacctcttacttttccattgagtcatctaccaaaggagatgtcaagggttcggttctttctcgggaatattcaggaactattgctagtgaggccaacacttacttgaattccaagagcacacggtcttcagtgaagctgcagggcacttccaaaattgatgatatctggaaccttgaagtaaaagaaaattttgctggagaagccacactccaacgcatatattccctctgggagcacagtacgaaaaaccacttacagctagagggcctctttttcaccaacggagaacatacaagcaaagccaccctggaactctctccatggcaaatgtcagctcttgttcaggtccatgcaagtcagcccagttccttccatgatttccctgaccttggccaggaagtggccctgaatgctaacactaagaaccagaagatcagatggaaaaatgaagtccggattcattctgggtctttccagagccaggtcgagctttccaatgaccaagaaaaggcacaccttgacattgcaggatccttagaaggacacctaaggttcctcaaaaatatcatcctaccagtctatgacaagagcttatgggatttcctaaagctggatgtaaccaccagcattggtaggagacagcatcttcgtgtttcaactgcctttgtgtacaccaaaaaccccaatggctattcattctccatccctgtaaaagttttggctgataaattcattactcctgggctgaaactaaatgatctaaattcagttcttgtcatgcctacgttccatgtcccatttacagatcttcaggttccatcgtgcaaacttgacttcagagaaatacaaatctataagaagctgagaacttcatcatttgccctcaacctaccaacactccccgaggtaaaattccctgaagttgatgtgttaacaaaatattctcaaccagaagactccttgattcccttttttgagataaccgtgcctgaatctcagttaactgtgtcccagttcacgcttccaaaaagtgtttcagatggcattgctgctttggatctaaatgcagtagccaacaagatcgcagactttgagttgcccaccatcatcgtgcctgagcagaccattgagattccctccattaagttctctgtacctgctggaattgtcattccttcctttcaagcactgactgcacgctttgaggtagactctcccgtgtataatgccacttggagtgccagtttgaaaaacaaagcagattatgttgaaacagtcctggattccacatgcagctcaaccgtacagttcctagaatatgaactaaatgttttgggaacacacaaaatcgaagatggtacgttagcctctaagactaaaggaacacttgcacaccgtgacttcagtgcagaatatgaagaagatggcaaatttgaaggacttcaggaatgggaaggaaaagcgcacctcaatatcaaaagcccagcgttcaccgatctccatctgcgctaccagaaagacaagaaaggcatctccacctcagcagcctccccagccgtaggcaccgtgggcatggatatggatgaagatgacgacttttctaaatggaacttctactacagccctcagtcctctccagataaaaaactcaccatattcaaaactgagttgagggtccgggaatctgatgaggaaactcagatcaaagttaattgggaagaagaggcagcttctggcttgctaacctctctgaaagacaacgtgcccaaggccacaggggtcctttatgattatgtcaacaagtaccactgggaacacacagggctcaccctgagagaagtgtcttcaaagctgagaagaaatctgcagaacaatgctgagtgggtttatcaaggggccattaggcaaattgatgatatcgacgtgaggttccagaaagcagccagtggcaccactgggacctaccaagagtggaaggacaaggcccagaatctgtaccaggaactgttgactcaggaaggccaagccagtttccagggactcaaggataacgtgtttgatggcttggtacgagttactcaaaaattccatatgaaagtcaagcatctgattgactcactcattgattttctgaacttccccagattccagtttccggggaaacctgggatatacactagggaggaactttgcactatgttcataagggaggtagggacggtactgtcccaggtatattcgaaagtccataatggttcagaaatactgttttcctatttccaagacctagtgattacacttcctttcgagttaaggaaacataaactaatagatgtaatctcgatgtatagggaactgttgaaagatttatcaaaagaagcccaagaggtatttaaagccattcagtctctcaagaccacagaggtgctacgtaatcttcaggaccttttacaattcattttccaactaatagaagataacattaaacagctgaaagagatgaaatttacttatcttattaattatatccaagatgagatcaacacaatcttcaatgattatatcccatatgtttttaaattgttgaaagaaaacctatgccttaatcttcataagttcaatgaatttattcaaaacgagcttcaggaagcttctcaagagttacagcagatccatcaatacattatggcccttcgtgaagaatattttgatccaagtatagttggctggacagtgaaatattatgaacttgaagaaaagatagtcagtctgatcaagaacctgttagttgctcttaaggacttccattctgaatatattgtcagtgcctctaactttacttcccaactctcaagtcaagttgagcaatttctgcacagaaatattcaggaatatcttagcatccttaccgatccagatggaaaagggaaagagaagattgcagagctttctgccactgctcaggaaataattaaaagccaggccattgcgacgaagaaaataatttctgattaccaccagcagtttagatataaactgcaagatttttcagaccaactctctgattactatgaaaaatttattgctgaatccaaaagattgattgacctgtccattcaaaactaccacacatttctgatatacatcacggagttactgaaaaagctgcaatcaaccacagtcatgaacccctacatgaagcttgctccaggagaacttactatcatcctctaattttttaaaagaaatcttcatttattcttcttttccaattgaactttcacatagcacagaaaaaattcaaactgcctatattgataaaaccatacagtgagccagccttgcagtaggcagtagactataagcagaagcacatatgaactggacctgcaccaaagctggcaccagggctcggaaggtctctgaactcagaaggatggcattttttgcaagttaaagaaaatcaggatctgagttattttgctaaacttgggggaggaggaacaaataaatggagtctttattgtgtatcata

SEQ ID NO: 4 - DNA, 3964 bp, Homo sapiens
  source 1..3964: mol_type = genomic DNA
ctactccaggctgtgttcagggcttggggctggtggagggaggggcctgaaattccagtgtgaaaggctgagatgggcccgaggcccctggcctatgtccaagccatttcccctctcaccagcctctccctggggagccagtcagctaggaaggaatgagggctccccaggcccacccccagttcctgagctcatctgggctgcagggctggcgggacagcagcgtggactcagtctcctagggatttcccaactctcccgcccgcttgctgcatctggacaccctgcctcaggccctcatctccactggtcagcaggtgacctttgcccagcgccctgggtcctcagtgcctgctgccctggagatgatataaaacaggtcagaaccctcctgcctgtctgctcagttcatccctagaggcagctgctccaggtaatgccctctggggaggggaaagaggaggggaggaggatgaagaggggcaagaggagctccctgcccagcccagccagcaagcctggagaagcacttgctagagctaaggaagcctcggagctggacgggtgccccccacccctcatcataacctgaagaacatggaggcccgggaggggtgtcacttgcccaaagctacacagggggtggggctggaagtggctccaagtgcaggttcccccctcattcttcaggcttagggctggaggaagccttagacagcccagtcctaccccagacagggaaactgaggcctggagagggccagaaatcacccaaagacacacagcatgttggctggactggacggagatcagtccagaccgcaggtgccttgatgttcagtctggtgggttttctgctccatcccacccacctccctttgggcctcgatccctcgcccctcaccagtcccccttctgagagcccgtattagcagggagccggcccctactccttctggcagacccagctaaggttctaccttaggggccacgccacctccccagggaggggtccagaggcatggggacctggggtgcccctcacaggacacttccttgcaggaacagaggtgccatgcagccccgggtactccttgttgttgccctcctggcgctcctggcctctgcccgtaagcacttggtgggactgggctgggggcagggtggaggcaacttggggatcccagtcccaatgggtggtcaagcaggagcccagggctcgtccagaggccgatccaccccactcagccctgctctttcctcaggagcttcagaggccgaggatgcctcccttctcagcttcatgcagggttacatgaagcacgccaccaagaccgccaaggatgcactgagcagcgtgcaggagtcccaggtggcccagcaggccaggtacacccgctggcctccctccccatcccccctgccagctgcctccattcccacccgcccctgccctggtgagatcccaacaatggaatggaggtgctccagcctcccctgggcctgtgcctcttcagcctcctctttcctcacagggcctttgtcaggctgctgcgggagagatgacagagttgagactgcattcctcccaggtccctcctttctccccggagcagtcctagggcgtgccgttttagccctcatttccattttcctttcctttccctttctttctctttctatttctttctttctttctttctttctttctttctttctttctttctttctttctttctttctttctttcctttctttctttcctttctttctttcctttctttctttctttcctttctttctctttctttctttctttcctttttctttctttccctctcttcctttctctctttctttcttcttcttttttttttaatggagtctccctctgtcacctaggctggagtgcagtggtgccatctcggctcactgcaacctccgtctcccgggttcaacccattctcctgcctcagcctcccaagtagctgggattacaggcacgcgccaccacacccagctaatttttgtatttttagcagagatggggtttcaccatgttggccaggttggtcttgaattcctgacctcaggggatcctcctgcctcggcctcccaaagtgctgggattacaggcatgagccactgcgcctggccccattttccttttctgaaggtctggctagagcagtggtcctcagcctttttggcaccagggaccagttttgtggtggacaatttttccatgggccagcggggatggttttgggatgaagctgttccacctcagatcatcaggcattagattctcataaggagccctccacctagatccctggcatgtgcagttcacaatagggttcacactcctatgagaatgtaaggccacttgatctgacaggaggcggagctcaggcggtattgctcactcacccaccactcacttcgtgctgtgcagcccggctcctaacagtccatggaccagtacctatctatgacttgggggttggggacccctgggctaggggtttgccttgggaggccccacctgacccaattcaagcccgtgagtgcttctgctttgttctaagacctggggccagtgtgagcagaagtgtgtccttcctctcccatcctgcccctgcccatcagtactctcctctcccctactcccttctccacctcaccctgactggcattagctggcatagcagaggtgttcataaacattcttagtccccagaaccggctttggggtaggtgttattttctcactttgcagatgagaaaattgaggctcagagcgattaggtgacctgccccagatcacacaactaatcaatcctccaatgactttccaaatgagaggctgcctccctctgtcctaccctgctcagagccaccaggttgtgcaactccaggcggtgctgtttgcacagaaaacaatgacagccttgacctttcacatctccccaccctgtcactttgtgcctcaggcccaggggcataaacatctgaggtgacctggagatggcagggtttgacttgtgctggggttcctgcaaggatatctcttctcccagggtggcagctgtgggggattcctgcctgaggtctcagggctgtcgtccagtgaagttgagagggtggtgtggtcctgactggtgtcgtccagtggggacatgggtgtgggtcccatggttgcctacagaggagttctcatgccctgctctgttgcttcccctgactgatttaggggctgggtgaccgatggcttcagttccctgaaagactactggagcaccgttaaggacaagttctctgagttctgggatttggaccctgaggtcagaccaacttcagccgtggctgcctgagacctcaataccccaagtccacctgcctatccatcctgcgagctccttgggtcctgcaatctccagggctgcccctgtaggttgcttaaaagggacagtattctcagtgctctcctaccccacctcatgcctggcccccctccaggcatgctggcctcccaataaagctggacaagaagctgctatgagtgggccgtcgcaagtgtgccatctgtgtctgggcatgggaaagggccgaggctgttctgtgggtgggcactggacagactccaggtcaggcaggcatggaggccagcgctctatccaccttctggtagctgggcagtctctgggcctcagtttcttcatctctaaggtaggaatcaccctccgtaccctgccttccttgacagctttgtgcggaaggtcaaacaggacaataagtttgctgatactttgataaactgttaggtgctgcacaacatgacttgagtgtgtgccccatgccagccactatgcctggcacttaagttgtcatcagagttgagactgtgtgtgtttactcaaaactgtggagctgacctcccctatccaggccccctagccct

SEQ ID NO: 5 - RNA, 533 nt, Homo sapiens
  source 1..533: mol_type = mRNA
tgctcagttcatccctagaggcagctgctccaggaacagaggtgccatgcagccccgggtactccttgttgttgccctcctggcgctcctggcctctgcccgagcttcagaggccgaggatgcctcccttctcagcttcatgcagggttacatgaagcacgccaccaagaccgccaaggatgcactgagcagcgtgcaggagtcccaggtggcccagcaggccaggggctgggtgaccgatggcttcagttccctgaaagactactggagcaccgttaaggacaagttctctgagttctgggatttggaccctgaggtcagaccaacttcagccgtggctgcctgagacctcaataccccaagtccacctgcctatccatcctgcgagctccttgggtcctgcaatctccagggctgcccctgtaggttgcttaaaagggacagtattctcagtgctctcctaccccacctcatgcctggcccccctccaggcatgctggcctcccaataaagctggacaagaagctgctatg

SEQ ID NO: 6 - DNA, 2480 bp, Homo sapiens
  source 1..2480: mol_type = genomic DNA
tttgcttcccctcttcccgaagctctgacacctgccccaacaagcaatgttggaaaattatttacatagtggcgcaaactcccttactgctttggatataaatccaggcaggaggaggtagctctaaggcaagagatctgggacttctagcccctgaactttcagccgaatacatcttttccaaaggagtgaattcaggcccttgtatcactggcagcaggacgtgaccatggagaagctgttgtgtttcttggtcttgaccagcctctctcatgcttttggccagacaggtaagggccaccccaggctatgggagagttttgatctgaggtatgggggtggggtctaagactgcatgaacagtctcaaaaaaaaaaaaaaaagactgtatgaacagaacagtggagcatccttcatggtgtgtgtgtgtgtgtgtgtgtgtgtgtgtggtgtgtaactggagaaggggtcagtctgtttctcaatcttaaattctatacgtaagtgaggggatagatctgtgtgatctgagaaacctctcacatttgcttgtttttctggctcacagacatgtcgaggaaggcttttgtgtttcccaaagagtcggatacttcctatgtatccctcaaagcaccgttaacgaagcctctcaaagccttcactgtgtgcctccacttctacacggaactgtcctcgacccgtgggtacagtattttctcgtatgccaccaagagacaagacaatgagattctcatattttggtctaaggatataggatacagttttacagtgggtgggtctgaaatattattcgaggttcctgaagtcacagtagctccagtacacatttgtacaagctgggagtccgcctcagggatcgtggagttctgggtagatgggaagcccagggtgaggaagagtctgaagaagggatacactgtgggggcagaagcaagcatcatcttggggcaggagcaggattccttcggtgggaactttgaaggaagccagtccctggtgggagacattggaaatgtgaacatgtgggactttgtgctgtcaccagatgagattaacaccatctatcttggcgggcccttcagtcctaatgtcctgaactggcgggcactgaagtatgaagtgcaaggcgaagtgttcaccaaaccccagctgtggccctgaggccagctgtgggtcctgaaggtacctcccggttttttacaccgcatgggccccacgtctctgtctctggtacctcccgcttttttacactgcatggttcccacgtctctgtctctgggcctttgttcccctatatgcattgaggcctgctccaccctcctcagcgcctgagaatggaggtaaagtgtctggtctgggagctcgttaactatgctgggaaatggtccaaaagaatcagaatttgaggtgttttgttttcatttttatttcaagttggacagatcttggagataatttcttacctcacatagatgagaaaactaacacccagaaaggagaaatgatgttataaaaaactcataaggcaagagctgagaaggaagcgctgatcttctatttaattccccacccatgacccccagaaagcaggagcattgcccacattcacagggctcttcagtctcagaatcaggacactggccaggtgtctggtttgggtccagagtgctcatcatcatgtcatagaactgctgggcccaggtctcctgaaatgggaagcccagcaataccacgcagtccctccactttctcaaagcacactggaaaggccattagaattgccccagcagagcagatctgctttttttccagagcaaaatgaagcactaggtataaatatgttgttactgccaagaacttaaatgactggtttttgtttgcttgcagtgctttcttaattttatggctcttctgggaaactcctccccttttccacacgaaccttgtggggctgtgaattctttcttcatccccgcattcccaatatacccaggccacaagagtggacgtgaaccacagggtgtcctgtcagaggagcccatctcccatctccccagctccctatctggaggatagttggatagttacgtgttcctagcaggaccaactacagtcttcccaaggattgagttatggactttgggagtgagacatcttcttgctgctggatttccaagctgagaggacgtgaacctgggaccaccagtagccatcttgtttgccacatggagagagactgtgaggacagaagccaaactggaagtggaggagccaagggattgacaaacaacagagccttgaccacgtggagtctctgaatcagccttgtctggaaccagatctacacctggactgcccaggtctataagccaataaagcccctgtttacttgagtgagtccaagctgttttctgatagttgctttagaagttgtgactaacttctctatgacctttgaa

SEQ ID NO: 7 - RNA, 1842 nt, Homo sapiens
  source 1..1842: mol_type = genomic RNA
cgatcagatcgatctaagatggcgactgtcgaaccggaaaccacccctactcctaatcccccgactacagaagaggagaaaacggaatctaatcaggaggttgctaacccagaacactatattaaacatcccctacagaacagatgggcactctggttttttaaaaatgataaaagcaaaacttggcaagcaaacctgcggctgatctccaagtttgatactgttgaagacttttgggctctgtacaaccatatccagttgtctagtaatttaatgcctggctgtgactactcactttttaaggatggtattgagcctatgtgggaagatgagaaaaacaaacggggaggacgatggctaattacattgaacaaacagcagagacgaagtgacctcgatcgcttttggctagagacacttctgtgccttattggagaatcttttgatgactacagtgatgatgtatgtggcgctgttgttaatgttagagctaaaggtgataagatagcaatatggactactgaatgtgaaaacagagaagctgttacacatatagggagggtatacaaggaaaggttaggacttcctccaaagatagtgattggttatcagtcccacgcagacacagctactaagagcggctccaccactaaaaataggtttgttgtttaagaagacaccttctgagtattctcataggagactgcgtcaagcaatcgagatttgggagctgaaccaaagcctcttcaaaaagcagagtggactgcatttaaatttgatttccatcttaatgttactcagatataagagaagtctcattcgcctttgtcttgtacttctgtgttcattttttttttttttttttggctagagtttccactatcccaatcaaagaattacagtacacatccccagaatccataaatgtgttcctggcccactctgtaatagttcagtagaattaccattaattacatacagattttacctatccacaatagtcagaaaacaacttggcatttctatactttacaggaaaaaaaattctgttgttccattttatgcagaagcatattttgctggtttgaaagattatgatgcatacagttttctagcaattttctttgtttctttttacagcattgtctttgctgtactcttgctgatggctgctagattttaatttatttgtttccctacttgataatattagtgattctgatttcagtttttcatttgttttgcttaaattttttttttttttttcctcatgtaacattggtgaaggatccaggaatatgacacaaaggtggaataaacattaattttgtgcattctttggtaattttttttgttttttgtaactacaaagctttgctacaaatttatgcatttcattcaaatcagtgatctatgtttgtgtgatttcctaaacataattgtggattataaaaaatgtaacatcataattacattcctaactagaattagtatgtctgtttttgtatctttatgctgtattttaacactttgtattacttaggttattttgctttggttaaaaatggctcaagtagaaaagcagtcccattcatattaagacagtgtacaaaactgtaaataaaatgtgtacagtgaattgtcttttagacaactagatttgtccttttatttctccatctttatagaaggaatttgtacttcttattgcaggcaagtctctatattatgtcctcttttgtggtgtcttccatgtgaacagcataagtttggagcactagtttgattattatgtttattacaatttttaataaattgaataggtagtatcatatatatgga

SEQ ID NO: 8 - DNA, 18001 bp, Homo sapiens
  source 1..18001: mol_type = genomic DNA
gaagtcatcagcaatgcaactgttcacatggaggatactccctgcttgaggggtcagacaggcctgctgggcaacccaggaggcttggatgaccgtctaccccagtgtttttgggatggaaagttccacattctgagaaccctcagtccctgggcaacctggggtggttagtcaccacagcttgtggcttgggcccatgacagcaggtagaaatgacgtggactgccgccagccgggcacagtggctcacgcctgtaatcccagcactttgggaggctgaggcatgtggatcacttgaggtcaggagttcgaaaccagcctggtcaacacggtgaaaccccatctctgctaaaaaaaaaaaatatatatatataaattagccaggcatggtgacgtgcacctgtggtcccagctactcaggaggctgaggcacaagaatcacttgaacccgggaggtggaggttgcagtgagattgcaccagtgcactctccagcctggcaacagagcaagactctgtctcaaacaaacaaaacaaaacaaacaaaaagacgtaagatgtggaccgctggagaatgggggtgctgcctgcagtcaaaacggagtgggggtgcccagctcagggccagaatgatcctattcccggcacttctcagtgaggctctgtggctcacctaagaaaccagcctcccttgcaggcaacggcctagctggcctggtctggaggctctcttcaaatatttacatccacacccaagatacagtcttgagatttgactcgcatgattgctatgggacaagttttcatctgcagtttaaatctgtttcccaacttacattaggggtttggaattctagatcgtatttgaagtgttggtgccacacacaccttaacacctgcacgctggcaacaaaaccgtccgctctgcagcacagctggggtcacctgacctttctcctgtcccccccacttgagctcagtggctgggcagcaggggatgcatggccactggccggccaggtgcagctctcagctggggtgttcagaggacgcctgtgtcctcccctcccccatccctctgtcacccttggaggcagagaactttgcccgtcagtcccatggggaatgtcaacaggcaggggcagcactgcagagatttcatcatggtctcccaggccctcaggctcctctgccttctgcttgggcttcagggctgcctggctgcaggtgcgtccggggaggttttctccataaacttggtggaagggcagtgggcaaatccaggagccagcccgggcttcccaaaccccgcccttgctccggacacccccatccaccaggagggttttctggcggctcctgttcaatttctttccttctagaaaccagcatccaggcacaggaggggaggcccttcttggtggcccaggctttggcgggattatttttcaaagaactttaggagtgggtggtgctttcctggcccccatgggcccctgcctgtgaggtcggacaagcgcagggagtctggggcctctcagagtgcaggaagtgcgcacagggtgctcccaggctggggagcacaggtaggggacggtgcgtgggggatggcgcctggggcatgggggatggggtgtgggaaacggcatgtggggcgtaggggatggggtgtggaggatcgggggtggggatggcgtgtggggtgtgggggatgggccgtgggggggtggggcctgggaaacagcatgtggggcatggggtgtgggggtgaggtgtgggaaagtgtgtggggtgtgggggatggggcatggaaagggcgtgtggggtgcaggggatggggcatggaggtgtgggggatggggtgtgtggggtgtcggggatggggcatgtggggtgtgggggatggggcatggaaagggcgtgtggggtgcagaggatggggcatgggggggtggggatggcgagtggggctggggcctgggaatggtgagtggggcatggggatggcgagtagggggtgtggcgtgaggatggctagtggggcgtggggatggcgtgtggggatggcgagtggggggtgggctgtgagggacagtgcctgggatgtggggctgcagccctagctcacagcatggccttatgaccccggccaccttcctgccccaggcggggtcgctaaggcctcaggaggagaaacacgggacatgccgtggaagccggggcctcacagaggtgagcagggactgccactggttttgtcctggggcccagtgggggccaacatcacctccttcccctcccatggcaaagagccagcccgcggggtggctactgcagtgccccccaaggagggtgttccctgctcgagaggaagtgaccgctccagcttggccttccctgggactggggtgcaggcgattttatcttctttgctccattctgttccttccagataatcgtgtgttcttcatcaggttttcctcagttcttgagagcttttctgatgcaaatctgctttcaccccagggcggtcaccggctctgctcacaccagcctccaagggtgtgggtgtcccgggagtgtgggtgtcccgggggcgtgggtgtcccaggagtgtgggtgtcccgggggcgtgggtgtcccgggagtgtgggtgtcccgggggcgtgggtgtcccgggagtgtgggtgtcccggaggcgagggtgtcccgggagtgtgggtgtcccgggggagtgggtgtcccgggagtgtgggtgtcccggaggcgagggtgtcccgggagtgtgggtgtcccgggggcgtgggtgtcccgggagtgtgggtgtcccgggggagtgggtgtcccgggagtgtgggtgtcccggaggcgagggtgtcccgggagtgtgggtgtcccgggggagtgggtgtcccgggagtgtgggtgtcccggaggcgagggtgtcccgggagtgtgggtgtcccgggggcgtgggtgtcccgggagcgtgggtgtcccgggggcgtgggtgtcccgggagtgtgggtgtcccgggggcgtgggtgtcccgggagtgtgggtgtcccgggggcgtgggtgtcccgggagtgtgggtgtcccgggagtgtgggtgttccggaggcgagggtgtcccgggagtgtgcgtgtcccgggggcgtgggtgtcccgggggcgtgggtgtcccgggggcgtgggtgttccggaggcgagggtatcccagaagtgtgagtgtcccaggggcgtgggtgtcccgggggtgtgggtgtcccgggggcgtgggtgtcccgggagtgtgggtgttccggaggtgagggtgtcccgggagtgtgggtgttccggaggcgagggtgtcccgggagtgtgggtgtcccgggggcgtgggtgtcccgggagtgtgggtgttccggaggtgagggtgtcccgggagtgtgggtgttccggaggcgagggtgtcccgggagtgtgggtgtcccaggggcgtgggtgtcccgggagtgtgggtgttccggaggcgagggtgtcccgggagtgtgggtgttccggaggcgagggtgtcccgggagtgtgggtgtcccgggggcgtgggtgtcccgggggttgtgggtgtcccgggagtgtgggtgttccggaggcgagggtgtcccgggagtgtgggtgttccggaggcgagggtgtcccgggagtgtgggtgtcccgggggtgtgggtgtcccgggggtgtgggtgtcccgggagtgtgggtgtcccgggggagtgggtgtcccgggagtgtgggtgttccggaggcgagggtgtcccaggagcgtgggtgtcccggaggcgagggtgtcccgggagcgtgggtgtcccgggggcgtgggtgtcccgggagtgtgggtgtcccgggggagtgggtgtcccgggagtgtgggtgtcccggaggcgagggtgtcccaggagtgtgggtgtcccgggggcgtgggtgtcccgggagtgtgggtgttccagaggcgagggtatcccagaagtgtgagtgtcccgggggtgtgggtgtcccgggggtcgtgggtgtcccgggagtgtgggtgttccagaggcgagggtgtcccgggagtgtgggtgtcccaggggtgtgggtgtcccgggggcgtgggtgtcccgggagtgtgggtgtcccgggggagtgggtgtcccgggagtgtgggtgttccggaggcgagggtgtcccgggagtgtgggtgttccggaggcgagggtgtcccgggagcgtgggtgtcccgggggcgtgggtgtcccgggagcgtgggtgtcccaggggtgtgggtgtcccgggggcgtgggtgtcccgggagtgtgggtgtcccgggggagtggatgtcccgggagtgtgggtgttccggaggcgagggtgtcccgggagtgtgggtgttccggaggcgagggtgtcccgggagtgtgggtgtcccgggggcgtgggtgtcccgggagtgtgggtgtcccgggggcgtgggtatcccagaagtgtgagtgtcccaggggcgtgggtgtccggggggcgtgggtgtcccgggggtgtgggtgtcccgggggtcgtgggtgtcccgggagcgtgggtgtcggggactgcagggacatgggcctcccctcccactcctgccgcccagggcacctcctgtgaggactcggagtccgtgagttcccacctccttgagcccgattctttggtgtccccgcctgcatcctcagcctccttccaaaccagaccagttctctaggggcgtcgacgtgtgaaactgattttaaagaaaacaggcagtggcctttctctcggccccacgtggcccagtagcgctcaccttccgtcccttcttccgcgctcagtaaccaatttaggccgctcctgcagaactcgggctcctgcccaccggcccacagcgtccacctgaggcctcgtcctcccagcaaaggtcgtccctccggaacgcgcctcctgcggcctctccagagcccctcccgcgcgtcctctcagccccgctcgcctcctcccggggcctccctctcccgcctgcccccaggcccgtctcccctcgcgggctgaggcaggttcgggcagcacggccgccccggggcgggggtcactctccaccaccgcgtggtgcccacagctcacggcgctcccgggtgacggtcccctcggctgtagggcgtcctgaagagcggcctgctcggagctgagcgcacggggttgcctcgccctgggcgtctctggccctcaccagccccgtcttcccatgggcaaaacggcggtcctgtttgtccacaagtaaccgtcggggttacggaggggccaggagctgcggcggggggctgtgctctcaggaccggccccaggaggatccgcgcgaggtctggagctctcaggggtcgcgggggacagaggggccccaagcggaggcggggaaggcggcagaagcccaggaccgccaagagctggcgaggaagcccggggctcgctgtcgggggagccgggcaggggccgcgcctcggaccaggacggaggcctggggaaggcggatctggccgccggagacgcggtgcgggtggagacgagggatttggatttccgcgggcggctgtacggatttccacgcgcggttcacgtgggccccagggggttgcccggcacccggggccgcgccgccttctcctcgccggcatcgacccgcagcctcacgtttacgcggcggcgcccgcagcccccttcggcccggcttccgcgcgtgcccccgagcgcgccctcgggatcagcccccggaagcagagaggccaggccgggaaggatgggcgacgggggtggctgacccgggagcacggcagggaggacacccagccaggcccgcgagcagcgccgctcccctcctccaggacgggcgggaacctgcgatgcccccgccgcgtgggccgtggggcggtctccgaggcactgggcggggcacgcggtgggcgcttcacggaactcgcatttcccagtcttcgtaacccaggaggaagcccacggcgtcctgcaccggcgccggcgcgccaacgcgttcctggaggagctgcggccgggctccctggagagggagtgcaaggaggagcagtgctccttcgaggaggcccgggagatcttcaaggacgcggagaggacggtgagcccagcctcggggcgccccgcgccgcggacactgcaggcggcggtgaaccaggccgcgtggggccgcctgcgtctctttggctgcggctgtgggcggcgaacacgcagcggcgcccgcgcggcgctttctgcgggggtcgctttccgcccggggtgactccgctttcctgggcgatgccccccacccccaggcacgcgctctccccgtgcggccgcaccgcgcatgccggttttcacatcagaaaatacgatttgcaaagcacacttagggtgtcccccttaacttcccaagggagtccccccagtccccgaagggtccagggcagcctgcgcatcgcagacgcgcgcggctcgcagaagggacgtggtgagaagctggcccacagcatgccaccagcggcacctcctcagggcacgtgtcggggagaaacaacacttagggacctgggactttctccagctcacgctcacgggtcacctcacactccaagatcacctcaaagaggacacctcacacagggcacacttcacactcacaggtcacctcacactcacaggacacctcacactcacagggcacacttcacactcacgggtcacctcacactccaagatcacctcaaagaggacacctcacacagggcacacttcacactcacaggtcacctcacactcacaggacacctcacactcacagggcacacttcacactcacgggtcacctcacactccaagatcacctcaaagaggacacctcacacagggcacacttcacactcacgggtcacctcacactcacaggacacctcacacaagacacctcacacggggcacacttcacactcacaggtcacctcacacccacaggacacctcacacagggcacacttcacactcacgggtcacctcacactcacaggacacctcacacaagacacctcacacggggcacacttcacactcacaggtcacctcacacccacaggacacctcacacagggcacacttcacactcacgggtcacctcacactcacaggacacctcacactcagggcgcacttcacactcacgggtcacctcacacccacaggacacctcacagaggtcacctcacacaggacacctcacactcagggtgcacttcaaacccacaggtcatttcacctcacactcacaggacacctcacacaagataccacacggggcacacttcacactcacaggtcacctcacactcacaggacacctcacagaggtcacctcacacggggcacacttcacactcacaggtcacctcacacccacaggacacctcacagaggtcacctcacacccacaggacacctcacacaggacacctcacagaggtcacctcacacccacaggacacctcacactcataggtcacctcagtcttacaggacaactcacactcacaggtcaccttactctcacaggacacctcacactcacaggtcaccttactctcacaggacacctcactctcacaggacacctcacacagggcacacttcactcccacaggtcaccatacctcacacagatcacctcatactcacagatcacttcattctcacaggatacctcacactcagggcacacttcacactcacaggtcacacctcacacagatcatctcattctcacaggacacctccctctcacaggtcacctcacactcacaggacacctcacagaggtcacctcacacccacaggacacctcacagaggtcacctcacacggggcacacttcacactcaggtcacctcacacccacaggacacctcacagaggtcacctcacacccacaggacaactcacagaggtcacctcacacaggacacctcacaaaggtcacctcacacccacaggacacctcacactcataggtcacctcagtcttacaggacaactcacactcacaggtcaccttactctcacaggacacctcacactcacaggtcaccttactctcacaggacacctcacacagggcacacttcactcccacaggtcaccatacctcacacagatcacctcatactcacagatcacttcattctcacaggatacctcacactcagggcacacttcacactcacaggtcacacctcacacagatcatctcattctcacaggacacctccctctcacaggtcaccttacactcatctcacactcacaggtcgccacacctcacactcacaggatgcctcacactcacagaaccacatctcatatgcacaagacacctcacactcaggacacctcatgctcaaagaagcctcacactcacaggaggtccagctgtctgaggcaaaggctaacatgaccctttccagacaaattgaggatggtcatgcctagcatttttatacacctagttttgaaagcatttctcatctgttgtattctcacagcaccccgtgagtttaagttcaggtggccaacagtttcttcagcaatcacttttttctgtggagtgcttttgctgtttgtggaatattttgcatctgctactgcaccctctccccgtatgtgtggccaccctgtcagaggtggagctgtggctcagagcctgtgtacctcgtcccaggtccacagctcagcgacagaagagtcagggttgaacctcgggtgttctgacttgggagcaggaaatgtgtggtcacccatagttccagatgtcctggggaggggccaagattagaagaaacctacctcagctccagaggaaagtctggcttcctgagcccaccccgccagacccaggtccaagtcccccaaccccagttcatggtgtgtccagtgcttaccgttgggtgctctggtgaaggtgcatctcacgaggcttgctctcttgttccttcagaagctgttctggatttcttacagtggtgagtggatgatcaccaccagtcctgcctgcaacccttctcagcttactgacaccagcccactccacagatggggaccagtgtgcctcaagtccatgccagaatgggggctcctgcaaggaccagctccagtcctatatctgcttctgcctccctgccttcgagggccggaactgtgagacgcgtaaggccccactttgggtcccatatttgcagagggccctggggagctggtggaggtggcctggccaaccgggctgcagggtgcacaacctggtggggtgtgtaggccgggcattcagggctcagccccagttggaaattggtctaggtgaccttgaaatcccttccagtctgaggtctttgacagggacccaaggttctgattatcagactcagtggccccttgggctcccggccctgggcaattctcagccctcgagatggcccagctgagagtccctgtgtccctgtcccacttccacatcccaccacgcaggaccgcttggtaaacttccccttctctactttccattacaaaggtttgaggggtttgttttttttttaaccatctgaatattaaattatcacaaagtttgaggcccccaacctcccttgggttcagtaattcactagaaggactcatagaatccactgaagtggatacactcacaggtaccgtttattacagcaaaggatgcaggcttaagtctgcagagggaccaggcacaagcttccccttgtcctctccctgtggggtcatgtggacagtccttaattctcccagaatgacgtgtgacgagacgtgggaagtactgccaacttgggaagctctacgagccccggtgtccagaggttttatcagggctcaatcacatagacccagctgaccacccgcatggctgacctcagtctcagcccctccagaggctacgccgatagtgcggcccaaggccccaccatacatcacattgtcagctagaccatccagcatggctcaaggcccaggtaaacaccaacattccctcaggcaagaccttccaagggcttagcggtcatttcccaggagccaaggcaaaggctaccctttctctggcacagcagttcatccttgaccacccaagaccacattcttacactgaatgagctctcctgtgcagcagccattttcttctctaagcagaagagagcccagcaagctggaggaggctgaagagagaggcttcctgctggtcatctgggtccagaatgcctggagatctctgctcagccctggtgcccagcagccctggtgtgcatcctgcagggcaggccttcccgccggagtcctggacttgctcagggccactccccttgcccatgtcaaccaaagtcaggctgccggttctgcttcttctgtctgagcccatgaccagtgctgggactaactgtccccaggcgggctcacggtggtacgaggccagcttggagaactgtctcagctctctggtcctctcgtcagttgggtctctgattggaaagtcccttggacacttttaccatccccattggactttcactttcccccaggctcccatcagctgctcggaagagtggtcaccctggaggccactgcccaccagccaggcaccccccaaatgcaaccgcagccagcactgccagccactggcaaggctgttcagacatgtggctcctctgatccacgccttgtcctttggatcagtccacggagcaggtggtgccaagctcaggctctgtcacccacagctcagtgccaccttccaggcagaacaccactgctgacccagggcatggccaccccgggggctggctctcgctgacccccagaagcccctctcagggtgtccccttcctgtccccagacaaggatgaccagctgatctgtgtgaacgagaacggcggctgtgagcagtactgcagtgaccacacgggcaccaagcgctcctgtcggtgccacgaggggtactctctgctggcagacggggtgtcctgcacacccacaggtgaccaggcttcatgtcccagtcccagatgacaccagtccctgtcccactacggattatcttactggacaaaagacgggtgggagtggcttcacatctactgagcactaactatgcactgaccaattgtgaggtgggatctgggcaccaagggtggcacaggccagagcgacagtgactaggatgggcaccctgggggcaatccctgaatggcctcaggccccctgccaattctaggcagaccaggggagccaagcaaggcactatctcacgtccaactcccactcgcaggacctccgccagggttcatgaatctacttcggcacagccaatgtctgtactgactgctgcccactctgcattccaaaactcgtaaaggctcctgggaaaatgggatgtttctccaaaccagcctggaacgaatgggctgcacttccaaaagcagggacaccccacacccactgtgtctcaaagaggcggacgtgcccaccctggccacacagcctgggactcagcctgccacctcctcgggcttcctttctggcccaagaccttgattgaagcagatcaaaactaagcatgggatcaaaacaacacagtttgattcatctttaggtagaatttcattcaccttctactaaagtcaaacaacacatcttctccctgaaaagtgagcagagggcggttttaagacgtaagccctctgtttcctccaaaaccagccctgaccattgtctcctcagccagccacttcttcaagggcctctcatggccgggccccaccagtcaggcccagccgaggccctgccttccaccacccctgggccctgggagctcctgctcctgggggcctcccatagcctcggcctcaaggcctctcagaggatgggtgtttctgaatctttcctagtggcacgttcatccctcacaaatctctgcatctttctgacttttgttttacacagttgaatatccatgtggaaaaatacctattctagaaaaaagaaatgccagcaaaccccaaggccgaattgtggggggcaaggtgtgccccaaaggggagtgtccatggcaggtaaggcttcccctggcttcaggattccaagccctgagggtcttgaagccttttgaatgtgaacaacagctctggaagggaaaatgggcaggtcagccccaagcccaccaggctccaagtcagcacacctagcacctccagctcgcggcacccccatgcttttagtggggcaaggaaggagaaaagaaaacgacactcactgagggtctaccctgtgcagagaaccctgcgagatgccccatccgagttgtcacgtcgtcctcacggttactctttgaggtgggatctttgcctgatctttgcaaaatcaggagcattggatcaaagctatgtgaagatcctgtgaggtgaacagtgaaatctcacagcgacatttgtattcttgggccgtgcccaagagcacgtctcggctagagaggggcacagcctcccagagccaggtctgagcagctttgcctgggagggatctgcaaagaccccaggatttcagaaagaaattgtgcaatgccagaggttccttggcatgcccgggagggcgagtcatcagagaaacaatgacagcaatgtgacttccacacctcctgtccccccgcccaggtcctgttgttggtgaatggagctcagttgtgtggggggaccctgatcaacaccatctgggtggtctccgcggcccactgtttcgacaaaatcaagaactggaggaacctgatcgcggtgctgggtgggtaccactctcccctgtccgaccgcggtgctgggtgggtgccactcttccctgtccgaccgcggtgctgggtgggtgccactctcccctgtccgaccgcggtgctgggtgggtgccactctcccctgtccgaccgcggtgctgggtgggtgccactctccgctgtccgaccgcggtgctgggtgggtaccactctcccctgtctgaccgcagctctcaagtgtctcaggggctgtggctctgggcttcgtgctgtcacttccacagacagacagacatccccaaaaggggagcaaccatgctgggcacgactgctgtggccaccgtgctctcagccactttcccatgcccaaataaaacgataaaagactgggggcttctgcccatcctgcctcacttgaccaagagcccagaagaggatgcgacacccagggcctcatgggaccaccggctggcaggggttctgctcactgggtttatgggtgagacgagcactcccaggagggccactgggccgggaagaactgtggagaatcggggcacgccctgtcctcccagctgccagggcacagcatcccttccccacctcaacacccagaccccagattcaccccagttcacttgtccccacacgagccacaggctgccacctggggcaggctggccccaccttggggttagatgcaggtccccttgccccagaaggagactgcagcccctgcagacctagaaatggccacagcccatccccatgcaccagggggtgaggtggcaggtggtggaaagggcctgaggggggcttcttccttccaggcgagcacgacctcagcgagcacgacggggatgagcagagccggcgggtggcgcaggtcatcatccccagcacgtacgtcccgggcaccaccaaccacgacatcgcgctgctccgcctgcaccagcccgtggtcctcactgaccatgtggtgcccctctgcctgcccgaacggacgttctctgagaggacgctggccttcgtgcgcttctcattggtcagcggctggggccagctgctggaccgtggcgccacggccctggagctcatggtcctcaacgtgccccggctgatgacccaggactgcctgcagcagtcacggaaggtgggagactccccaaatatcacggagtacatgttctgtgccggctactcggatggcagcaaggactcctgcaagggggacagtggaggcccacatgccacccactaccggggcacgtggtacctgacgggcatcgtcagctggggccagggctgcgcaaccgtgggccactttggggtgtacaccagggtctcccagtacatcgagtggctgcaaaagctcatgcgctcagagccacgcccaggagtcctcctgcgagccccatttccctagcccagcagccctggcctgtggagagaaagccaaggctgcgtcgaactgtcctggcaccaaatcccatatattcttctgcagttaatggggtagaggagggcatgggagggagggagaggtggggagggagacagagacagaaacagagagagacagagacagagagagactgagggagagactctgaggacatggagagagactcaaagagactccaagattcaaagagactaatagagacacagagatggaatagaaaagatgagaggcagaggcagacaggcgctggacagaggggcaggggagtgccaaggttgtcctggaggcagacagcccagctgagcctccttacctcccttcagccaagcccacctgcacgtgatctgctggcctcaggctgctgctctgccttcattgctggagacagtagaggcatgaacacacatggatgcacacacacacacgccaatgcacacacacagagatatgcacacacacggatgcacacacagatggtcacacagagatacgcaaacacaccgatgcacacgcacatagagatatgcacacacagatgcacacacagatatacacatggatgcacgcacatgccaatgcacgcacacatcagtgcacacggatgcacagagatatgcacacaccgatgtgcgcacacacagatatgcacacacatggatgagcacacacacaccaatgcgcacacacaccgatgtacacacacagatgcacacacagatgcacacacaccgatgctgactccatgtgtgctgtcctctgaaggcggttgtttagctctcacttttctggttcttatccattatcatcttcacttcagacaattcagaagcatcaccatgcatggtggcgaatgcccccaaactctcccccaaatgtatttctcccttcgctgggtgccgggctgcacagactattccccacctgcttcccagcttcacaataaacggctgcgtctcctccgcacacctgtggtgcctgccacccactgggttgcccatgattcatttttggagcccccggtgctcatcctctgagatgctcttttctttcacaattttcaacatcactgaaatgaaccctcacatggaagctattttttaaaaacaaaagctgtttgatagatgtttgaggctgtagctcccaggatcctgtggaattggatgttctctccctgccacagcccttgtcaatgatatttcacagagaccctgggagcacctgctcaagagtcagggacacacgcatcactaaatgcaagttcccaggccctggctgcagtgggaggacctggcaagctgcactcttgctgagtccccagggtggtggaagaagaatgagaaacacatgaacagagaaatggggaggtgacaaacagtgcccccactcagactccggcaagcacggctcagagagtggactcgatgccatccctgcagggccgtcctgggcaccactggcactcacagcagcaaggtgggcaccattggcactcacagcagcaaggcaggcaccagcaacccacctcgggggcactcaggcatcatctacttcagagcagacagggtctatgaactacagccgtgggctgcttccaaggcaccctgctcttgtaaataaagttttatgggaacacacccatattagtgtccatggagtggccgtggcagagacgtccagccggacagaccagctgacccgccaagcccagcatggttagtgtcaggacctctgctgaagatgcttgctgaccctggccagaccccggttcctaatgccccctaaacgggacgggagccagtggcgggccctgatccaggtcagagctggctctgctttctcttttgtccgagtgaccatgcctcagtttcctcatgtgtaaaacaggagcccaccgtgatgcttatggtgggatgagatcagcatggatggaacaaggccctggaagggcccatgccatggtcatcgacagcaaagccactctgcagacagatgcttcagtgaattggtagaaaattctgcaaccagaatgcccggggctcctgagggcctaagcccagcccagggttctggaagccactctgacttcttgggagtggaagttggcaggactcttcctgggaagaagcggagggtggggatgagaggacagttcaggagcccacccagacccacaggaggaaactaggggagtcatgcggggtcctggtggagcgccagcctcccttcctgccaatgggaaatgcaggcgcccacctcatggtgctgccggaggagggggcccgggactccccagaggcttcgctgaagggcctgggcgcccccaaaggctacatgtttcatatgggacgtgccacctgccacggctcagctccagctttctgtgagtggcgagatagaatacggggaggccactggccatgggcctgggacagggtgggatgaggcggcaggcttgggccaccaaagccagcatcgccacccagcattgatgacaaagactgcgtgtctgccatgagcatcctgctgttggtgcacacaccgcattggtctctccatacaaacatgcctagaggcgatgtcagagggtggagaccaggagaggcaggagtcagacatctggtgccaccaggaaggcccttctcagaggaccaggctgtgcgtggtgcccgccgtgggaggccagcctggcgttggcatccagcatcatcagtttgtgcagtcgggtggggctcagtgagtgcctcctgtgtgccaggcacaatgacgcacaatgtgtgcacaccaggctcatgtgcaggtggctgcgagacagggcgacccatcaaggcagatgcaccatgaggcagtggccagtgctgtgggtgttaggggcattgctccccggccactacggcatagcaggcagtgatcgccacactggccaagctttagaccatttattccagagaccccagaggcaaaaagcccggctgcacctcccagtgactcccacagccattgagcagagacactcaggaccttgtgatgggaggtttctgcactggagaacgagcccagaagccctctcagcctcggaacagtgtggccagtggtgggcaggtcaggaggggcttcagacacagcctgtccctccagatggtcacgggaaggtcactccccacagaagtacgttttggggccatgcgggcacagaaggtttgggggtgggtggggcaggtgccagcctggcctgtgggaggccatggtgcagatgccaagccccccccgtgacatgagaccacctgataccacccagagagtggctgtgagcggaagggcccgcccagaaacaagcagggccttggggcagaagtcctgggctcagatcccacgctcactgccagcggcctcggctcaggcttctgcgctctctaaacttagttttctcttctggaaaaatgatggggaaaatgatatttgtatgtgaggactgagagttaaatgtaaacatctggaaactacaaaatgagcacgaaatgatgtttttattcttagaacagaaagtccccacacccgcggccctggtgactgatgaggatgaggttctgcggggcctctctggccgcccagctctgcctggggaaggtggggcca

SEQ ID NO: 9 - RNA, 3278 nt, Homo sapiens
  source 1..3278: mol_type = mRNA
aggcacacaggcaaaatcaagttctacatctgtccctgtgtatgtcacttgtttgaatacgaaataaaattaaaaaaataaattcagtgtattgagaaagcaagcaattctctcaaggtatatttctgacatactaagattttaacgactttcacaaatatgctgtactgagagagaatgttacataacattgagaactagtacaagtaaatattaaagtgaagtgaccatttcctacacaagctcattcagaggaggatgaagaccattttggaggaagaaaagcacccttattaagaattgcagcaagtaagccaacaaggtcttttcaggatgattttcttatatcaagtggtacatttcattttatttacttcagtttctggtgaatgtgtgactcagttgttgaaggacacctgctttgaaggaggggacattactacggtcttcacaccaagcgccaagtactgccaggtagtctgcacttaccacccaagatgtttactcttcactttcacggcggaatcaccatctgaggatcccacccgatggtttacttgtgtcctgaaagacagtgttacagaaacactgccaagagtgaataggacagcagcgatttctgggtattctttcaagcaatgctcacaccaaataagcgcttgcaacaaagacatttatgtggacctagacatgaagggcataaactataacagctcagttgccaagagtgctcaagaatgccaagaaagatgcacggatgacgtccactgccactttttcacgtacgccacaaggcagtttcccagcctggagcatcgtaacatttgtctactgaagcacacccaaacagggacaccaaccagaataacgaagctcgataaagtggtgtctggattttcactgaaatcctgtgcactttctaatctggcttgtattagggacattttccctaatacggtgtttgcagacagcaacatcgacagtgtcatggctcccgatgcttttgtctgtggccgaatctgcactcatcatcccggttgcttgttttttaccttcttttcccaggaatggcccaaagaatctcaaagaaatctttgtctccttaaaacatctgagagtggattgcccagtacacgcattaaaaagagcaaagctctttctggtttcagtctacaaagctgcaggcacagcatcccagtgttctgccattcttcattttaccatgacactgatttcttgggagaagaactggatattgttgctgcaaaaagtcacgaggcctgccagaaactgtgcaccaatgccgtccgctgccagttttttacctataccccagcccaagcatcctgcaacgaagggaagggcaagtgttacttaaagctttcttcaaacggatctccaactaaaatacttcacgggagaggaggcatctctggatacacattaaggttgtgtaaaatggataatgagtgtaccaccaaaatcaagcccaggatcgttggaggaactgcgtctgttcgtggtgagtggccgtggcaggtgaccctgcacacaacctcacccactcagagacacctgtgtggaggctccatcattggaaaccagtggatattaacagccgctcactgtttctatggggtagagtcacctaagattttgcgtgtctacagtggcattttaaatcaatctgaaataaaagaggacacatctttctttggggttcaagaaataataatccatgatcagtataaaatggcagaaagcgggtatgatattgccttgttgaaactggaaaccacagtgaattacacagattctcaacgacccatatgcctgccttccaaaggagatagaaatgtaatatacactgattgctgggtgactggatgggggtacagaaaactaagagacaaaatacaaaatactctccagaaagccaagatacccttagtgaccaacgaagagtgccagaagagatacagaggacataaaataacccataagatgatctgtgccggctacagggaaggagggaaggacgcttgcaagggagattcgggaggccctctgtcctgcaaacacaatgaggtctggcatctggtaggcatcacgagctggggcgaaggctgtgctcaaagggagcggccaggtgtttacaccaacgtggtcgagtacgtggactggattctggagaaaactcaagcagtgtgaatgggttcccaggggccattggagtccctgaaggacccaggatttgctgggagagggtgttgagttcactgtgccagcatgcttcctccacagtaacacgctgaaggggcttggtgtttgtaagaaaatgctagaagaaaacaaactgtcacaagttgttatgtccaaaactcccgttctatgatcgttgtagtttgtttgagcattcagtctctttgtttttgatcacgcttctatggagtccaagaattaccataaggcaatatttctgaagattactatataggcagatatagcagaaaataaccaagtagtggcagtggggatcaggcagaagaactggtaaaagaagccaccataaatagatttgttcgatgaaagatgaaaactggaagaaaggagaacaaagacagtcttcaccattttgcaggaatctacactctgcctatgtgaacacatttcttttgtaaagaaagaaattgattgcatttaatggcagattttcagaatagtcaggaattcttgtcatttccattttaaaatatatattaaaaaaaatcagttcgagtagacacgagctaagagtgaatgtgaagataacagaatttctgtgtggaagaggattacaagcagcaatttacctggaagtgataccttaggggcaatcttgaagatacactttcctgaaaaatgatttgtgatggattgtatatttatttaaaatatcttgggaggggaggctgatggagatagggagcatgctcaaacctccctaagacaagctgctgctgtgactatgggctcccaaagagctagatcgtatatttatttgacaaaaatcaccatagactgcatccatactacagagaaaaaacaattagggcgcaaatggatagttacagtaaagtcttcagcaagcagctgcctgtattctaagcactgggattttctgtttcgtgcaaatatttatctcattattgttgtgatctagttcaataacctagaatttgaattgtcaccacatagctttcaatctgtgccaacaactatacaattcatcaagtgtg

SEQ ID NO: 10 - DNA, 162001 bp, Homo sapiens
  source 1..162001: mol_type = genomic DNA
aggctgttgcgtatgtgagtctggagttcggaagagacatccaagttgctgacataaatttcggtcttcagtgtagaaatttgatttaaagccattgggttaaacaaaccaaccaaggtaagagtatttgcaggtaagagaagagacccaaggacttagccctaaggcactccagcattatgatgtaggggagatgaggaaccagcaaaggaggctgaatggaaacagagaaggaatggcgagttctgtgcaagagacaggaagaaagagaatgcaaaatggtcaaacaataaataattaagttgaattagatggtaaagaaataaatgcaaggaaatgcaaggccatagtcactgggcagacagagtaaaagaacatgatgaatcaggtgagattaatcacccctcctggaactatcagaaaaagatactcactgacagtgaggcagtcatgttagtccccaagttgatgactaatggaaactaaggtcacagtgcacattaatttcttttgaagcaaaggataaaaacaaacaaaatataaaagattaagatgtaaacgttagtgtacactaattcagagaagaattaaatgatttttaaaacttcaagaaggaggacagcattctaaatgcattgttctaaaacgatagtaagatgggataaatagtcacactagggtgatgattttggatgtgttaaatttgtcactttgagaccagatatgctccatttcacttcatgccagcttttaagaacatatatcatagaaaaagagaaaagaaacagttgaatcaaagtgaagagaaatattgtgaagcaaataaatccagggaaaaattaataaaaccctattcccaccctaaaaaaaagaaactaaaagaagtgcaaatataaagttcaataggagtcattagagattgtaaattgggctctgagcttcctaccaacaaaagcacaaaggaaaatatgatcactggtattaaaaaaaaacacctatggtttccaaaagattaaaacaaaccagcagttttatagaagctaacactaaaatctaaaggaactacgttctatggagccacttaatatggataaacactttgacaatattctttcaacaactacagtaacaagtttcttagagtccatttctttttacatccataatgaattgtaaatcttttctacttcttaagtaaaacatcaccacttaattctggtaacttttccatattaactttttagaacaattgcaaacgtaccataaatgattgttgtcacagtggtaactatttgaccctgactgttattttgtatatagcagcttttaaaataaaaaggcaacaagtttctaggcgtaatttccacagatcttttatgtaaaacaatgacatcctttgcaacttctgccatttaatctatctcaagcaagctctctggaaacaaatctatttgaaagattctattgtaattagaaatcagggtaactgaatgcactagatgaaaaccttctgactggggccaatgaagtcaataaagtcaaaactgctgtgaatgctcaactgtctgcagatcagatgtcttgggatggaatccgttctcgaggccaccatcattaatatcaatttggccatgtaatacaagcctcacttgttccactgttacaaatgtgcttaaaactgagctcatttacaatccaaatacatatgtaggatggtaaccaaggcatcacactaatttaggtattatgttttagggggaacaaaaggtatgttaatattttattcatctccaaattaactataaattgtgcattcttgcatagatcctccttgggaatgagaaattaggaaaatccagttgttaaaatgaatgcctaaaatcaaaataaaatttgtttttctggcacctgcttgatgacacagactaataaccaatgacaaaattgcccttgaacccaagttttcatttcctcctattgtgtggtcaggttatgtaagggtttgctttcaccccattcaaaaggtacctcttcctcttctcttgctccctctcgccctcattcttgtgcctatgcagacatttgagtagaggcgaatcactttcacttctgctggggaaattgcaacacgcttctttaaatggcagagagaaggagaaaacttagatcttctgataccaaatcactggaccttagaaggtcagaaatctttcaagccctgcaggaccgtaaaatgcgcatgtgtccaacggaagcactggggcatgagtggggaaggaatagaaacagaaagagggtaagagaagaaaaaagggaaagtggtgaaggcagggaggaaaattgcttagtgtgaatatgcacgcattcatttagttttcaaatccttgttgagcatgataaaattcccagcatcagacctcacatgttggtttccattaggatctgcctgggggaatatctgctgaatcagtggctctgagctgaactaggaaattcaccataattaggagagtcactgtatttctctccaaaaaaaaaaaagttatacccgagagacaggatcttctgatctgaaattttcttcacttctgaaattctctggtttgtgctcatcgttggtagctatttgttcatcaagagttgtgtagctggcttcttctgaaaaaaggaatctgcgtcatatctaagtcagatttcattctggtgctctcagagcagttagcccaggaaaggggccagcttctgtgacgactgctgcagaggcaggtgcagtttgtgtgccacagatattaactttgataagcacttaatgagtgccttctctgtgcgagaatggggaggaacaaaatgcagctcctaccctcctcgggctttagttgtaccttaataacaggaattttcatctgcctggctcctttcctcaaagaacaaagaagactttgcttcattaaagtgtctgagaaggaaggtaggttatatttttattcccattctatagctgggtaaagtgagttctaacaaagttacttgttaaaggtcactcagaggtcagagcatcagaaaaaaagacaatcacaaggctgatgttgtgtgctggatagtttaaactgaacaggaagaaaacatttttgtgggctttatctaaaaagaaatagtttgctctgagtttctcagtttcatttattcagcaagtatgtgccaagtgctattgtaggcaatgaagatacagcagggaacaaaacaaaactgacatggagcttccaactagaaaggagaacgagacaacgcgttttaaaatatatataatgtgttaggtaaaaagtgctataaggagagctaaaacacaatgagaggctagaagagtgatagtggcggaggggcttctctgaggagatgacatttgatcaggggtctgaataaagtaaagaggccagttatgtgaatatctggaagactcaaggggcagggcggaaatagccagtagaaaggccctgaggtaggaaggtgtgtggcaagtttgaggaaaaggaaagacagtctgactggagcaaagagaactggagctgaggccatcaaggcagccaggagccaggtgcagactgggctttgactctgcctgcagggaggaactgctgaaggttccaagcaaaggaccgccctgacctgccttaggtttgaacaggatccctctggctggtgtgtgaagaattaactgtagatgggcaagtgtggaaggaaggagagcagtcaggaagctgccataaccatctacatgagagaggtaaggcctcagatggaggggagcagtggaatggtggaaagtgtttattttgaatgttaagcctgcaggagttgctggaggattggacatgggggatgagaaaaagagagaggcttacagatcaggtaatttagctgatcttaagccccttacagcttaatattattccaaggtgccaataacagccaaggtaaacaaccttgtcttggacattctgcctttatttgcccacacaagatgaaattaaatatatatatatatatataatttaaataaataaattatatatatatataatttaaataaataaattatatatatatatatttagtgctgtttccatcagctactagctgagacacttgggcaaatgagggtgatctccagtcctcagtatccttgctgttaatgagagatggtcatttcttctctgcctagctcaaaagaatatgttaaataaaactctgtgaactttaggcagcacaggcttagggcttcttagtaacatcatcagcaccatcagagttaacttcatgagtcagttgagttgcctttggggtatatcattaacagattccaggaagctcccctgcccaaaagcctcccaccaatggcctgccttgttgaaagaattacacaattagcccaattcctttccattaaggcattgtggactccaaacatcctcctttaaaatggaaactaaatcgagctactgtcagtcatttgtccttttaggtgacgttatatatcagatcacttttctgccattagagctagttgaagtttgaatagggaaaaggaacgaatgaacgtggggcagagaacgcaatagtcggtgggttactcagtaggctgtggacagatggagaggatcccggtgggaggagcctctaaagataaactttctatgggaaaatgttgacagatttacctgagtcatggtttttcttacacctcataaaaatgaaggcttccaagggcagctccttgaaatagctgtaacaagtagccacagaagttgagttgcttaaagaaaaacattgaattcatggggaaccgtacgctttaatagcccctttggcttactttgtttaaacaaactcatcccgagcatctcacacttcaccaattttgagtgtccctgctttacctcagccttttaaagagtgtctttcccctaaatatttctggaaatgcctaagggtgctgacgtgcagccagaaatagttcacttctgtccccactatggcaggaatccatggaccaaggctctgatgtttccacaaagatgcccctcaggactagaaatctgtccccatccccgttgccaccacagtcaccatcacctggaaatcctgcaggaccaatgtttgtgaatttggaatatatgctagatgccttactaccttgttatgaccttatttctttatagcacttttaacctagcgcattacatattttaaatgtataattcagcgatccagatcactggtccagtgtcacctcccactcagcaaagtgagatgaacacacttggtgctacattcagctaggctggcactgtagatgcacccagtcccaggtattctagtggctcatgacagggcttcctcactggagacatgctgagccaagcaaggcagtttttaccaccaaccctgatagtcgtacacatattctgctcctccacccccaccaaggttgaaactccgctcctgtcagctttgcagctaccaccaccccctcagggagagtcatctctgttcccaaacccatataaatgtcattcaaagccagaggatgtaattgctgtagtaattgttatagtccactcatccaggggccccactgcaaagctgattaaaccatagtgttactaccttttacagagttattattcttccaaatcaacccactgcacctttctccaaggctacaaaagtgcccctagggtggctgtgtacaggcaagttttgatgtcagctgggaaactacctataacccccactctctgctaacaccaacttttctttttctattttattttattttattttactttaagttctgggatacatgtgcagaacgtgccggtttgttacacaggtatgcatgtgccatggtggcttgctgcacctatcaacccaccacctaggttttaagcctcgcatgcattaggtatttgtcctgatgctctccctccccttaccccccaccccctgacaggcccgggtatgtgatgttcccctccctgtgtccacatgttctcattgttcaactcccacttatgagtgagaacatgcataacaccaatttttcttattggaattgtagtgccagtttagttcttcagtggaagcacttgttcttctctataatctgttctccatctgggaacaccctactttctcagacataggtttgcagtgcattggtgggcaggatttcagtcctttctctgaaagttcctaagccctattgaaaaatgaatgcactggggaagggtgtggcccatctctctccccagaagctcctgagccacatttcttacccagtcccggaaccctggtatcctaaaccatgtctgaacctgtacccctgtggccccagaaagggaccaaacagtacatcccatgaaaccacaaagagatcataaccttctcctctctcctcccacatctctacataaacaacatttatatagatgactgaattcaagatacgtttatttggtactgatggtcaactggaagttcctaagcagaattacttataatgtgggactgtgtttttagtggttgcagtgaaggctcaacacccctaaacacggtgggaacttgctgaggaggcaggctgtgaagggcagggtattagcatctttccttaaaataacatgtgtcttagtgtgctcaggatgctacagtaaaaataccatagatttggtggcttaaacaacaaacatttatttctcacagtctggaggctgtgaagtccaagatcaaggcactgacagatccagtgtctggtaaaggcctgcatcctagttcatagcccgctgtcttctcactgtcctcaagaggctgaaagggtgagagagctcttccgagactctttcataagggcactaatcccattcatagggctccaccttcatgacctaattacttacaaaggccctacctcctaataccatcatattgggggttaggatttcaacgtatgaattttggggagacacaaacattcagtctatataacaacacgtaccgtgaaactttcctactcataaaagtaatatatcttcactggagaaagtaaaaaagtacagaaaaatatgtagaagaaaatctaccatcatctcacatccagagatatccatggtaaatattttaatacaattcctgtgaagttattcagtacacattaatagagtttgaaaacataatctaatataaaagcatgaaattcataaagatattttaaaataaagttaatatgtatgtgtgtatatgtatttttatatatacacaaacatatatgcttattatttttattgtgagcattcccccatattattagaaaaccatgattttttgttctttttctttttcttttcttttcttttttttttttggagatggagtctcactctctcacccaggctggagtgcagtggtgcaatcttggcttactgcaacctccacctcccaggctcaagcaattctcctgcctcagcctcccgagtaacagggattacaggcccctgccaccatgcccatctaatttttttgtatttttagtagagatggggtttcaccatgttggccaggctggtcttgaactcctgacctcaggtgatctgcccacctcggcctcccaaagtgctggaattacaggcataagccaccgcaccagaccaaaaaccatgatttttgatggcatcatcttatggatgcaatataattaatttaaccattcttctactagttaatattaaggtcatttccaacttttattgttgttacattgcctctcattttctttataaatatttggctctttttattttggatatgttgtagctaaaatgccatccagatagtttattctgatttagtgcccaccaggttctaggtgcatgactgccatagcagagatagttgcatacagttcaagtttagattttgtttgtgagcgggagaatccaaagaccaagttcctaatattcttttgcctgaaaaatggctacataaccttgccaaatctcttaacattttcatgcctttgtttctaatatggaaaatgaagatactcaccaatttgtaactgtaaactactacacaagaatgaggtattcatttaaccatatggtgagattttgtagttaaaattaattaattgtgctcagtggtcagactactggctttaaatcctggatccattattcattacttcctattgtgtaacctgggcaagttacttaacttctcttctccttagtttcctcatctataaaatgaataacagaagcacttaccataagtgaggatgagataagatggtggtatatgtgagtggtacacatctgttactattattatcattgttatttattattaagcagtgaatttagactcaatgtgaaatggtttagaagtcatcagcttcccgtttcatgttcttaaagcactggtgataagagtatgcctgtatcatgcagttataactttaatcaaaatatgaaagtaactttaatcaaaatgccaagtcaaattagcaaagtcagcccttttcaaaatgtgtgccctaaagtaataaggtctgcagggtgtgccccagggacctttggtggggagtgggtggtagtcagaatggcgaaaacagtggggatttttagggcccccactcacattgctttgcttttatagcaaaaattgttggctgatgaacaaaatcatttccttttcttggactcacagctagacctaacttcccaagtcctgtacagttaaatgttaccatacaattacagtggagccatatgtgtctgtctcaaccacccaagcctgccattgcagtgtgaaagcagccataggcaatacttaaacaaagggatgtgctgtgttccaataaaatgttaccaaactttcctatagtttgccagcccctgaactagagcatggtaaggcaagagagaattgtagaacgtggttggaaaggcagaaggagtcagggaggaaagaccttgtggaactctagcacaaagtttggattttatcctaaaagcagaagggaagcctttgaagggttttagaaaagggtatgacctgaattacagaagctcagtcctcagcagatcagtatttcaacattcactcaccatgtgaaccattgatcccattttgttacttcctctgtagaatctcctcttaaggaaattgaaagcaagctcctgaatgagatggcattttcagggaaagaccaggaggcagaccccaaggggcttcacaagatggcatttttgtggccttggtggatttgccatgaccttggcttggcaggatcagaaacctgaatctattcgcctgtaagtcctcttttcttgtaagtcctataagacttacactaagttcaggtgattaacatattaagtcaaaaagcccattttagtaatttttaatgaaaaacataattgccacatgtgagaagcccattctattttcatagacatacttatattagaataacaatgaccataatggttagcatttattaacaataacattgtgccaggcacagtgtcaagcattttccatgatgacctcacaagtctatcggtaggaattgtggttaaaaccctcttatagataaagtcagaggttctaaacttataagatcacaatgctagtgagtggtagagatgagatttgaacccacacagtgtaaaccagagtgtggatacctagccactacaacatagtgtctcataggagacatgttcagaaggttgctagtggacattgaatccatgggggaaaagaaggcagaaaaatctgattttaatgttatcaggttaatggggcctgatgcagccatcttgcagaagaacggtattgctagcaggtcctccatgtttgtttacaacactggctacggccttcccactaggatgggaattcccaaatcctataatttcctagatggtgctggaagaggcactgctgaggtttgttttgccaactatctttcccctcttcttcttgccttatttgtcattctatccattaaggtgacttttcatccattttatatgaatttcataattaacctctcagggtaattcccccagcccaccctactatcagggcagtccccaatatgactaatcattcccacatactaagaccacagactgcttcagaatctgtatttatattttcactattaaaaaactatgctatcgtttcctgaaatctctatgaaaaaaaaatactaagctatatctggagtgaaatggtcagtaagaacacagtttgtcacacaaaataatgaaaatgctatttcttacttatagtgcagactggggttcttcctctagaattagaaatattaggcttgctaagatgtgatggggagttcattggggctagtgttttagcttttgaactcttcaaaaggaacagaaatgaagaaaaagacctgctttaataaacaaggttaagtctgtatgatttatggacttatgagcaaatctgacatccactcacatgggtggtcctcccaagggataaacttcgtaaaagcacatttaagaaaaagggagcagatactgttggtgccctcttcaccaggagacacactgaaaggctgcagtagcacatcagagcctcacaggtcagcatcagccaaacagctgttctgtgcatcacaagaattcgtacatatttcaaaatgactaatttgtacctatgagacaggatttgacccactaatttttgtaccgtaacgttttaataaaaattgttttttcaaagcgaagctttgctgagcagatgaattatcatgtgggagtttaaaaattagtcaaaggagtcttgacaactaagtcctttaagcttggccttcccttggcctctgcctactcctgatcataatctgaataaactttaacttttcgactagaatgcaaaacacgtgtttttgtaaaacgaatattaatggcataactcgtgctttattattttagctgatttgtatcaatgtatcaacattccaaagaaaatagggagcatatgttggttaataatttttgttatgactattgacatgtaattcacatgacataaactttaccattttaaaaagtacaattcagtgagtttgagtatgttcttaattttgtacaaccatccccgctatcaaatttcaaagcatatccatcacaccaacaataaactctggttctattagtagtcactcccaattcccttttccctagccccctggcgaccactaattaattatttctctgtctctatggatttgcctaccatgaacattgcatataaatggaatcacacaatatgtagtcttttgtgtctggcaccttccactcaacatactgtattaaaggtttctccatgttatagcatgcatcgatccacacttcatttcctgttatggctgaataacattttgtcctctgaatctaccatatttgtttatccactcatgagctgatcacttaggctgttgccacttattagctattatgaataatgttgttatgaacgttcatgtacaagtttttgggcagacatgttatttctcctgggtaaattcctaggagttgaattgctgggtcatatagtaactctatgtttacctttttgagaaaactgccaatatgttttccacagtgtctgaaccattttataatttcgctggcaatgtatgagagttccactttctccacatcttcaccaacatttattttcctttttttaaaaaacaattattgctgtcctagtgggtatgaagtgatatctcctgtattttcaatttgcatttctgtaatgaataatgatattgtgcatcttttatgtgcttattggctagttgcacatcttctttagagaactatcaggtcatttgcctttttttgaaatgttggttgtctttttattgttgaaatataaaagttctttatatattctagatctagacctttactggatatatgacttgcaaattctaccatttctgtacgttgtctacaatttcaaccattctgtgggttgtctttttattttcttcacaacgtcttttgaagcagaatagtttttcattgtgatgaagtccagtttgactatttttttcttgtgcttttggtattgtaactaacaaaccattgactaatccgagattctgatgtacatacatgctttcttctaagttttataattttagcttttacatttaagtttttaatccattttgagttaattttttaaatattcttttgcatgtagctatccagttgtcccaatgctatttgttgaataggtgattctttcctcattgaatggtcttggtattcttgtaaaaaatcagttgactgtaggcatatgggtttctggactctcaattctacccgactgatctgaatgcctatcctcatgccagtactacactgtcttgattactgcagctttgtagtatgtaagtagtagtacgttttgtgagtcctcgaactttgcctttttttatagattgttttgctattttgagttaagtatttttttaaaacatcaagttaaaaatgaagctgccactctctaaaggaggacaatttcagaaaggcactgagacctgtgcttggtatgtagtaggtgcttttgaaaatgtttgttgcatggaatggattgatttcatctctattctaacactcaatgccatgttcatttcccctttggagcctttcatctctcccttctcttttctaagaaaatcagtaactctctcattcatacattgtacacatacatatctttatttgtttatgtgtctattttccactaattagactataatgccatataaggctagaattacatctaattcattgctgggtcccaaagccatgcttaagaccataagtatataggggttttttttcttttaaaaagtttttatttttaattattatggatacataagagttacagatatgtaaagggtacatgtgacattttgatacaagcatacaccatataatgatcaaatcagggtaactgggatatccgtcacctcaagcatttgtaatgtatttgtgttagaagcattgcaattccactcttagttattttgaaatatacaataaatttttgttaactgtagtcaccctgttgtctactgaacactagatcttattcctcatatctgactgcattttcgtatccattaaacacccctcttttttattttttattttatttattattattatactataagttttagggtacatgtgcacaatgtgcaggttagttacatatgtatacatgtgccatggtggtgcgctgcacccattaactcgtcatctagcattaggtatatctcccaatgctatccctcccccctccccacaccccacaacagtccccagagtgtgatgttccccttcctgtgtccatgtgttctcattgttcaattcccacctacgagtgagaatatgcggttaaacaccccctctttatcccccctccccactacccttcccagaccctagtaaccatcattctattctttctctctctgagttcccacatatgagcaagaaatgtgatatttgtctttctgtgcctggcttatttctcttgcataatgtcctccagttccatccatgttgatgaaagagacataatttcattcttttttatggctgaataacatttcattgtgtatatgtacaacattttctttattcatctgttggtggacacttaggttgattccataccttggctattgtgaatagtgctgcggtaaacatgggagtgcagatatctcttcgatatactgattttctttcttttgggtatatgtccagcagtgggattgctgggtaatatggtagctctattttgttgttgttgttgtttttaggaaccttcatactgttctccatagtggctgtactaatttacgttcccaccaacagtgtatgagggttcccctttctccacacttttgagagcatccgtaattccctgtctttttgatagaagcaattttcactgggatgagatgatatctcattgtagtttagacttatatttctctgatgattaaggatgttgagtatttttggccattcgtatgtcatctattcagatcttttgaccatttttaaatcaaattattttttcctattgagttgtttacacaacttatatattctgtttattaatcccttatcagataggtagcttccagatattttattccattctgtgagttgtctcttcactttgttgatggtttcctttgctgtgcagaagccttttagcttgaggtgatctcatttgtccacttttgcactggttgactgtgcttttgatgtcttattcaaaaaatatttggccagaccaatgtcatctcttgccatatacaaaaatcaaatcaaattggattaaaaacctaaatcgaaggcctgcaagtatgaaaccactagaataaaacaatatatatgtgttggagggagagaagaaagtaatgaagaaagaaaggccaggtgagaaagtaagagagaagggaaaatgaacaagaaagacaaaagtcattccaggcactgttttaaggggcatctcatttattcttacaaccttatgagataagcactcttactttcagtttgttcaggatgctataacagaatcccatagactgcgtgggttataaacaatagaaatttatttctcttagttctagtgactgggaagtccatgatcaaggcactgacagaactgttatctggtgaggacctgcttcctggtttacaaatggacagccatcttctcttcttgctttgtcctcacatggtgggaaggggtaaagaagctccctgaggcctcttttatatgggcactaatcccattcatgagggctctgccctcatgaccaaatcacctcccaaaggttccacctcctaatgccatcaccatggggttaggatttcaacaggaatttggaaaggacacagacattcagaacatagcacccccattttacagataagaacagtgagaaacagagagttaaataattttctcaaggtcatacaacgaacccgtagcctaggcagcctggctctttggtcatgttcttaaatactatgccatactgtctctcaaataaacactaaaatcaagatacttgggatgatcgttgggaggcagagcccagatatctatactttaaacaaattcccaaatgatctgatgggcaactcagatgaaaatcaatgcttcaagaaatagccaaataaaactctatggaaggtaaagatggggagagcttggtgagatgtcatacttgggaggaaaagccagggaaagtaagagaaaactgggtattagtaaagatcatggagaagggaaaacacaagatattgctaggctaaaaaagaggcagacctgatgaagcagtgaacaccacttcagccactccctaccttggccccagctggccctggctgtgactgtgttccatactctgcaatgacatgtaacttccaccacgtccatatcatacctaaagcctacttcagtgtgtccacaaaagcaagtaagaataaaaagtaagagaaacaactcacatttatttgctgcttattatgtgccaggctatgtccttttttttttgagatagagtctcactctgtcacccaggctggagtgcagtggtgtgagcttggctcactgcaacttctgcctcctggggtcaagtgattctcctgcctcagcctcccaagtggctgaaattacaggcacgtttagtagagatggggttttgctatgttggccaggctgatcttcaattccagacctcaagtgatgtgcccacctcagcctcacaaagtgctgggattacaggtgtgagcctccacacccatgtgccaggctatgttttaagtgctctacccatgagaactcacttagtcctcataacaatcctgtgaggtaggtactattgtttccccccattttacagggaaggactctgaagcacacagaggttaaggagtttatcaaggtcactgtagctaacaagcagcagaaccagattcaaacccggagcccacactcttaatcactatgttgcttctagaagaaagaaaataagggatgaaggatagtaaaaacatgcaagcccttctgagccccctgttgttggccccactttggcaggagtgttaggaagactatgggaactcaaaggtgacacttagcactctcctccagaggctacaggagccatcattggtagctagccatttgtatcccccgtgatggtggagaaaagcccacactgttgcaagtttccagaattttctctgctctggaaaagactcccaaactagggttaatcaagtatcttttttggtgaatttcattaaaattaccacataaaaaaagaagaatttgtcctgaattatacatataggagaaaaatgataaaataaaataatttccattatctttgtagcaaaaaaagttggaatgattccaccaggttctctgaaggactttgttttcaaaggagatgttaaaatgtgtaaaatatccaaaggatacacttttgcagctgaatttaggatcttaagaaacatggttttaccgtgtttcccaatgattgttgaaaagaagcagtgactgggttacatctagggcagggtttctcagcctcggcactattgacattttgggccgggtaattctttgttgtggggggctgtgctatgcattgcaggatgtttagcaggatccctggcttctacccactagatgccaataagattctccctttccatctgtgacaaccaaaaatgtctccaggaatttccaaatatcccctagggccaaaatcacccagttgaaaactagtgttctagggaaaaccattataattaatagcatgtctatgatctcccctgttgcgggaagtcagggaccccaaacggagggaccagctgaagccatggcagaagaacgtggattgtgaagatttcatggacatttattagttccccaaattaatacttctataatttcctatgcctgtcttcactgcaatctctaaacacaaattgtgaagatttcatggacacttatcacttccccaatcaatacccttgtgatttcctatacctgtctttactttaatctcttaatcctgtcatctcctaaactgaggaggatgtatgttgcctcaggaccctgtgataattgtgttaactgcacaaattgtagagcatgtgtgtttgaacaatatgaaatctgggcaccttgaaaaaagaacaggataacagcaattgttcaggtaataagagagataaccttaaactctgaccgccggtgagccagggggaacagagccatatttctcttctttcaaaagcaaatgggagaaatattgctgaattctttttctcagcaaggaacatccctgagaaagagaatatgcccctgagggtgggtctctgaaatggcccccttgggtgtggctgtcttctatggttgaaactgtagggatgaaataaaccccagtctcccatagcgctcccaggcttattaggaagaggaaattcctgcctaatatattttggtcagaccagttgctctcaaaccctgtctcctgataagatgttatcaaagacaatggtgcccaaaactttgttagcaattttaatttcgcccccgtcctgtggtcctgtgatttcgccctgcctccatttgccttgtgatattctattaccttgtgaagcgcgtgatctctgtgacccacacctattcgtacattccctccccttttgaaagtccctaataaaaacttgctggttttgcggcttgtggggcatcacggaacctaccaacatgtgatgtctcccccagacgcccagctttaaaatttctctcttttgaactctgtccctttatttctcaaactggctgacgcttagggaaaatagaaaagaacctatgtgactatcggggcaggttccccgatactccccaaagtattgcatggaatgccacatttcttttatcatagtgcttcaaataagtatttcagtgtgttactgaaaatatttataaacaaaatatatttgatagcagggtatgaatatgcccgtgtccttggaagagaaagaggggacaagagaacaggtataacagcatgttgttggtgaaaataaattggtagtaatatagattgaatatcccttatccaaaatgcttccgacaggaagggttttggatttcagatattttcagattttgaaatatttgcagaatacatacaggtagagcatccctaatccaaaaatccaaaatctgaaatgttccaatgagcatttcctttgagcatcatgatagcactcaaaaagctttggattttggagcatttccgatttcagaatttgggattagggatatttgacctatagtaatgccaaatactgcactaaaattagcaaatgtaatctcattgaattgtgacaacagccttaagaggaaacccgatcattatgcctacttagtagatgaggaaacagaggtaactaggtcaaggtcacacaacttggagtgtcagagtctggattctttctagttctgccctcgtccaagccagttctgttaacactattcttcctttcagcataatctgtgtcatcactggagcttatgtctacctgcctgccacccagcaccaactgtttaccctttaagtctcattctgcctcctccaggagccttccctgacccctgccttcaccttctgacctgtgccccttcacaccctgtgccctcttaactgggaaagccctgagggcaggggccataccttatttacctctatctccagctcactgcacagaggcattcagcagatgaccagtaaatatgggctgtctagtaaaaactttgcagttagagataatgaaagaaacataattacttctgtgtgggttgagaaagaagggaagggaaagtccagatacttaagcagaaaaaggcaaacagtccaaaaggggaaaagtaacttgcccaaatcatgcagttgagggcaggaagaaagggggacaaagccaaaaccaaaacccagtcccttgtcccagcccagtgctttgtctgctacgttacacaaactgtgattgtgaaattaaagggtttttgatggcactgatataagtaaataaatggctttatgagttaacacatgacaagcaataaactcataaaaggtaaatattgacaactgaagattatatatcactatgtttagtgtgtggagaacccaactaggaattaggaaagcttgcacattcagtctggtttcttggcaaatcaatgagacttcaaacaaatcattttatttctctgtgcttctgtttcttttggctgtagtattttgctggttaaagagcacgtgatcaatgtctatgcttttaaatgtctgtctttatttgagcatgctcagctggatgtggaaaacctatggttctcttgggtttcataaggatcaaatcccacagtgatatgtaaacttgtgtggtttatagaattataggacctcaaagctgggagaggcctgataaatcatatagtgaaaatttccagccagtgcctggatttcttttacagaatctttcttttattggacaggtgctcccttcacaatccatgatgtaaggagaaaaggggcttcgtttgaaggaagttagtgtattgtgtatgggcgtgtactttctgcttggggtgtgcctacagggctatctcactttctgaaagcgtaataataagttactttaccatgcattaattaaatgtcagagaccatgctaaatgctttacagagaatatcttttttaatctgtataagaacctcctgaggcagataatattattaaccttacttttcagataaggaaactaacattcagaaaagttaagtaacttgctaaagacatgtgtctactaggaggtagagtctcaagtctatttcaagctcctaataagtaaataaatgtctattgaatccaactaatgacatcccactccatattcccctgccactgatgagagagagaagtataaagtttatgtaaataagacagaagcaatgttttatataagcattgtggatttaattccactaagggattgatttttcatcttaatggaactttttcttcagctatcaagtttcagtttcaagatcgcaaatgctaagaagatattaaaatattttaatacataattccactagatcatatttataggtactgttaatatattaccaaatctactataaacaaaacaataaaacaaaaggctggatcaatatggaaagtagagtaataatttaggccctaaagaaaaactacgtaagacatttcttagaggattaccaggtttctctctctctctctttttaaacacagcctaaaatagaaaagcaatttatgtattaataaaaaaaatagaaacctgaggcagatgtaaccagaataggtgaattaactgaagactgatattcttatttatgtttgtgtattttaaataaagaaggagtttgaccatctcatctagttaatcattaaaaggaaactcgagccaaacttgtgaagcaggtaaagtttatttttagacattcaactggcttctcttttgggctccccttttcttttggggtcatcctccatgtctggtaaccttaacctccctgtctcttccagaaggagcaacacccccatgttttagacctttacttctgatgtcaggaccctttctgatgcaagtgttagctaactccagctggctgaagaggaaggaggaggaagagaaggagggggaataatgtattgaagtgtgtaatagtcaagtctaggagcagccctcaccttaggatctagacattcatattatataattgggaatctatttccagatctctttgctttttttttttgcaaacctcaatccaatggagtctctaagtggtagaccacagctgctccaagcttgcatcgtatcagcttagctattcctgttgagaaacaagacaagtttccaagtagtcccagaaagccaagaattaaggtgtatctgtccctgtcatgtgcctatctctgatattaccagacctggcccatgcagagttacagatgggttaataccaccataagcgcatggaccaaagttagggaaaggatagttttccaaaggaaatgttaggtcctagtatcatatgtggagaggggatacttggcaagtaaaacagtacctatctaccatgtggccacaacagggcagatcagggtccctggtaggatggaggcagccatcaagcattatggtatccctgaataatcccttcccagttcatatgtaaaccaatcctcttaaattgttaatgcatttaacataaggatggattcagcaaaactgtatcaatagcaaaacatgaggggtctccagctagtagcctgtcctgcatagccatccatgactactgctctaattgattttttctagaatgtctaaaggaagatgaaagtagaaaatgagctgtagtggacaagcatttttaaaatgagcccaataatgtagcacttttgggtgcttgataattgttgcaaatcacatttgcctgagaaatttcaattctataataattgtacaatagcagaaagatctagatacaaaaatattcattgcagcatggcttgcaatagtgaaaaattgaaaacaatttacatatacttcaataaggaaaggttaaaacaatggtatactatgctactattacctgaaaatattgaaaagatgaaaagatgtccaataacatttgatgaataaaggttgaaaaatacatgtagtaaaatctcatttttgtttttaaaaaacatatatgcatgcatgcatccatgtatagacaaaaaggatttgaaaatatacaataaattatagttaatcacatttaccttatggtactgcagaacatcagaactcattcctcttatctagctgtaattttgtaatcgttaactaatctctccccatcctccccttccccctgcccttcccagcctctgatagtcacaattctactttctatttcacataataaaagtttttaaagaggggaataatggggtgggggatctggaatatacataaaaactcaaaaataattacaaatttgttgccatcaaaatataaaaagaaaaaaatagttacatctgcaaaatgggattgtgtgaggaagtttttacctttatacatttctaccttctgtatgtttggatttttacaataagtatgtgttattttctagcatcttttgaagtttttttcttaaaggcataagtaatatctaaagttatttttcatccttctaatgccgtctacacaaagataacgatttttcttggatggccccaatctctcttctgtaagatctttccccatttgtcatatccataactcataacctcctcacccttcactgctctccattttctctataaagtgagcccagtcagtacttgtaggcttgttaagcattacttctaataagaaagactaacttgtaaagcaaatgtggaaatgtactaatatagcatcaagcacaaaatagccattcaataaccgaactatttaattccttttttttcacacttcatcctttccctaattccagaaagaacttgaactgggtcataacaaagacaaatttagacagacagataaagatatctcataggtagaaataaaactgagtgattataaactaatcacaggaggctctgttagtctgatgaacagaaacacacgtgataaaatcacagagaggtaaaatagaaaatgaaaatcaggatcaagaaaagggaaataaaaatatgctggacatcattcaataactatttgctgatggtaattatagggatggaaaacccatcaggcctatggagctaaaattaatcagcaagtattcacagagtgcctactgcttctattactggttctggcttcctgcctgcccagtgcagaggcttgagacatttgcgtgacattcagcttgtcaagacagaaggagcaaaataagcagacagaggctcactgcagccgcctatacccatcatattgttggaatcatattcaagtgagacaaactccttcagtggaagacgataaaactagcttaaaagttgtaaacatcacttcatcacccaaaaaaggcccaattaagtggagatactatttctgcaaagcaatcatcaattcatttgtgtaacatttgaaatttcaaagtacaaacccacattctattaaaggcaggaagtgaaaccaataaaacttgtaacaactatacttaattttcagggttctttccattgctgacaaacattttaagtcatgtctattctcttaaaatgtaaaatatgatgtttatgtcactgttaatattttgataaaaagctattgtcatggacatctgggtttttttctgcatgcccagaaatcccttttctcctatttaaatttaaaatctccaattatttggagaagcacctcctcttctctctctttcatttgtaccccattcttaggtgtcagtggtgggcacttgagctaggctttgcccatcatagtacacattcctgacatcccttggtcatagttattggtccagggataagcatttgaaccaactagaccagtgaaacccctcccaggaacaactactaaaattatgggaaaagaactctttccactgaagttactaacctggcaggatgtgttaaatccaggtgccacaggccaccaggtggagaggtggagataatctttccagaaaacaaaacaaaacaaaacaggaaaatgaagctaagggataaaatttaagccctttggacttcatttgagcccctgaatccagtcatgcctcctgaaattaaacttcccctggacttttcagtgaatcaaaaaactctgtttttaacagtggggtttcttataaatgcaccaaaaaatgacctaatgaatgttgtctacaagcttccattagaagtattatcttcaagagaaaaaaaaaacaaataacttgaagaaaacccttcataattcaagtcagtcctgctaacctctaggaaaccctccgtgaccaccatctccatatccacacccattttcctaaccttaaacaccagatgacttcttgaagcttatgaagtgccctatgcatctaacacatttctgtaagtctgcattgttctataatgacttgtaaccgtatctgtctccatttcctccagagaagagattgttatcattttgatatccctgcagccttatactggggcctaacatataatagttgctattttgttgaaggaattgtattttgttgaaggaattctcttttgttgaaggaatgaatggagagaatattaattaagaaagtctcttctattaataaacattccctgattgattgaaaccatgcctaaaatagctaatcatcagaagaccaaagtaaacaacatatccaaactgaatcctcaaagtgttagtcattggtagctgtatagctgagaatctttccttcttctggtcattagggttgaaagggtgggtgaatgtggagacatgattctttcttttgcaaaacatttactattttttaaactccataaaatgtaataacttctcttgaaaaatgttaaaacccaaacaaaaaaacctgtaatgtggaatatagattgtaggttataatggaggaagcagggaaagtggggaaaactgtggttgccagaagttttctgataactaataggcaagacaatagggtggcttttggtagggtccttctttatggcatagcaaagaaaaataggaatgaagaagtgagaagcatgaaaggggacagcaatatatgtgtaacacagggtgattcagtgtgagagttttataattaaaattgccaaatgtgagaaaaaaaaatctactataaattgggataggctcaaggcatggagatgaacaaataacccctccatgtgggcaaaaatcaatgaaattactagatgagtagcttagtatgtgagttccagttgcaacatgttactggtatttggggcttcccctcccccctccccccctgcactttgaggcaattcgacatttgactaacaatccagcctaactttctccatctgatataaagatatttaccttgaaatcctagaactgccaacatctcctacttcctactacaaccctccctgactccttttctctggcacagctttctatgcactcaccccattcaactaagcctgcttactcttcaccagaaggtcttctcttagcataaaaagttcctggaagtccatctctttcatagagctgctggatgactgctttgcttacctttggccttcaaaatacctctcctgtccaaccatagctccccagctcccctgccattgcaaccaatacaaacttcgtcatctttccttgggccaatgtgcctgtctcctcactgctctccctgctttctcccttagcccctacaactcatactccacatcgcaagcagaacgagcttttcaaatagtaaattagattatgtccattagtgtgttagtaaatgtttaacagctcctgaggggaacagagtatctatgtgttttataatttttacatatatgtatcacataatttacaaaaagcaagaaaaaatataacactcttaatagtaaattctatatggccatgtgattttcacagaaccatttcagtgatttttgcagaatatttgtgtccatagccaacctacagctaaaattcaaacacgtttggcaaaatcagaccacaaataaatatctgattaatatccaatcagcaaagaagtcattcatggtactgaagtcccaacatgaatgttggttgatatttttacattaatgagcgagataaaagtgaagcaacaaaaatggatgttggaactaaactcgttcattaatgacagaagtgacttcttttgctgataatagctttcaagtactagaaaaatatttcctcaagtttttgtgttcacaaactaaggcacttttaagttcaatcttcattattaaaatttcttctactctgtcagtctagacaatcaacaaaacaaatcaagctctggtttgtcatgtttcccaatttctatagtataggtactccaccatggttgatttcaaactaccaaaataacatttctgaatgcagcgttaggaagggatacgctgcatcataccatcgtatggtatgttcttatacagaacagacagaaataactttaagaacatagataatagtaaaatggagtaaaataattaggcagtaaagtcttcagcatttatttttgttgttaaaatatttgattgtgagtttataaataatttggtttttaataatgactgtgattaacaaccaacttacaaaatctctgaaaatttaacagtcagtgcttgcaagctggtacaattgtttccggtgcactactgaattatcactcccctgcctaaaattccagactgcccattgcactgattccctgggaaataagtgaaaagagacaatgataattttcatttttgttgtggtgaagtgatagtgcaaaaattccataagctcctctaagttttccaaataaagcttagtgtttaaaaacgtttgaacacatgatcccatgtaaggcctacattacttcctgtgtgataggtggggtagatatcattatccttcctttacagattgaaaaacaaggctgagaaaaatcaaatgcctaccccaggctcattcaagtaagtaaatggcagaatagggtctaaaaaccaggtcttgtattgaaaattcaacaagaggatagagaaaatttaattgacaaatactgatctcaaaacaatttttttttcaatggtgacaaatgtcctttgtagcactttggagtttgatatgaagtatcttcttatcttgttaagggatccctataccaagaatgttttcatctcaaccccactatttctaagttagcttaaaaacaaaacaaaaccctgtgtgctctaataagaagatataagaaccaaaatggaaatgcaggttctcaaatgagctgaaagattccacatagcagcggggcagattgaaacactctttaccaaaggaacatgggagagaaaaggagattaaatcaagaaaggaagaaagctaatgacatatgaggagccacaaatgccacaaatgaaaaaacaaagtacgtaatacttgttgcaattattcagtgtgcttgctctaatgcctccaaacattaaaaacattgagttcctgcttatggcaacatttatctcatttatctgctgatagctgcctcatccttgaatcaggtattgcttaaactaagttctgccagcataaagaataaagtcaaccaggacacccattgggcatttcacgcatatgagcacaaattgtgatattttaggttgcttatgatgaaatcattgaaagcatcatgaaagacagcaaaacagcaggaaagctagtaataatttagcatttcccagtccaggcgggaatgttaattctaattacaacgaggaataccaaagtggagttcattatgattaagaacttgctgtactagtgtgaattgtttataataggcatgtctggcataaaatacaaatattgaagcagacagagatggctcattcaaagctcagctgggttcccttgaacctcttaccttataaagttaaataggaatagaagtattttccaaagtcaagatattattttaaagagacaaataatagctatgatagctgcaggaataattttttaaagtaagttctaaccaccaataaaagctgtttgtgtgggcttaacatgttcaaaatacacaatacacatgtacacaatacacgtatacatggttcccatttatatttaacatcacacatttaaagtgagagagtacagaaaaaaagaataaatggaaactgaagccatgacaaagaatcacggactataggaaaataagtcacaaagaagtatgcttatgtaagaggaaatatatgtgataaacaacaggagacatgggaatgaatgtggtgtcttatgtcctttctttaacagaatcgtgtaacagacactactcaatatcgatctcaactgatccagttctccagtctccctggaaaacaatggattgatgcccagggtgcgctgaacactggaaccatggtcacttctgcacttcacacgattctgctcccaccagttgagctaccaacagttcctggtgcttttgcttcccaaacatgtttatgccatttgttgcttattactgtacttacttaatttgattaaatattaagtaaaatgatgaaatgagtgtaaaaaattgttctataaaatctaaatggaaagatgccctatagccttccttgacttacagttgcgtcaagtaaggtggatgtaagacaattttaaaagactggtgtgggggcaggagtgaggaatcataaaaatttagaaatctgcacgaaaattattctaaaagtacacattgaacatccctaacttgaaaatctgaattttgaagtgctccaaaatccaaaactttttgagcattgttatgataccacaaatgaaaaatcctacatggaagtacttaccacaaactttgcttcatgccccaaattattttaaatattgtataaaattatcttcaggctataaggtgtatatgaaacaaaaaatgaatttcctatttagacttgggtcccatggccgagatatctcattataatgcaaatattccaaaatcagaaaaaaaaaaatccaaaatctaaaacactttcagtattaagcatttcaggtcatggatactgaatgtgtatctttaatttcttgttctactttgtttaaaaaaaagggggaaaatagtaattctacagatgaataataattgctaatgatgagcaaatacttcctatgacccaggaattcgtctaagcacttcacatatatcaaactggtttaatctttataaatcagtactattattatccccattttacagatgatggaaaaaggcacagagagttagcctgcccaaggttacattccttttagtggtggagactgtatttggcctttatagtctggcttttaactgctacactatatcaatgcattacaggtatagtttatacacacactaaagaagacatggaactccagtcagtgggctcataaaagctttagaccttcatcaaaagattagaaaataaatgttcaatcacaggttttaggtttcaaaagtttcaaaagtttaaagtttgcaagttatctttcttaaaattatttccttcttttaactaatttttaaattaaactccagttcaatcacatccactagaaggcttcactttctacaaaggggtaggtaaaggtgatgatcttaaataccatactgggagttgggatctgtgtagcactagaatcaagagttattgtatatacttgagaaggagcacagcctgatttagttgatgttttggaggggtaatctggcagtacagcttggattattttagtgggaatggagatgacaaaacatgaagagaatgggagaactcacttgggtaatatatcagtttctgaaatcaatgtatcaagtggtttggttattagtcaggcttaaggttttattggccttaggacatagtctctaagaccatatattatcttcattcattcatttaaccaacacccactgagcaccaactatgcactagtgatacaggggtgaacaaacagacacagtccctgcctttgcagaacttatgttctggtgggtgatacagagaaataacaaatgagggcacaaataatgaactatcattgtaatgtgctaacaaagtatgcagaatactataagaacatacaatcaagaatctaatctagtttattttaaaaaaaagtggggggagcactcagatgtttaaacacaaaacaataaaaatgaggatcttgagggttatctgtacactttttattaacccatttggccacaacaataacccagtaaaagtgattttacatctagttaactagttgactcaatgttattataaccctgtaatgtatttgttgggtgcctgctatgtagtgggctgtgttccaggagtgggacataaagctatgacaagatagatcaggtccttgccttgactgagtctgaatacatcaccttcatttccacctctgcttctaagacaatcaaataccttcccactcagatagggattcatcctatttcttgtagtaattataagttcccagggttacagattagtaaatgccatacctaaagacttaggatactgtgcataaaacactttcaatagtgtctgtcagacagcagatgcgcaataaatgttgactttcgttagaattgtgttattattataatgctaaatctcacgtcctttctggcacactggagttcatctcttcaattaaattccgtaagcacatattgtaagtagtctatcagaattgatatactacttcatgttaatgattgagatcagtgaggaaaaccactttaatattgtctaattcctctcttaatgcataggagccatgtgaacttagacaagcatcaacctctgtaagcctgttgtcctcatattgaaaaatcgaataacaatacctatctcatttaattgttgtcagcaaaagtgggcagcagaagagtggggatcaataaatgttagccacaaatcataactatttgtattactctgaaaaagaggggttaacttatagttcatgcatgcttccaaatgaatgtgaaagactaaagaatgagaatttttttgctatcaaattaaaaaattaacaggcacatttagattgctgaagagagaaattaggataagtttttttttttttttgctcaattaaaaacgttttcaatggcatatttaaaactacgtattcttccccattaagatctgcagagaaaaaaaaatgaagggagaataattgggaactcttgtgaaatcataaattatttaagcagagtacctaccactaaggatttgagcatgtatgagcgatgaggtggattcttagagcagagattcagcagtgagacaggctaatggcatggggagatgtgttctattagacaactgtattgtccccttaattatatacatatatatgtatataatatatatgtgtatacatatgtatacatacatgtatatataaatagaattcttaatcattttaagcagtgtacaaggataattattagcatgggctatttaactcacttttaaaacgtgtaaaacattattgtagggttgggtcttgatttgtttcccatgaaactgttggtagtttaggggccaaattaacgaaagacatctcattctagtgcttgaggctcagaaattggaaaaacgggcaactaggtcaagcagtgttctcatagcctcacagatgagcatccaaagcaagggcctccttctagttgacttgtgccaagggacaggagaagcggagtctgccttctgggtccagaagggggttttgttaacatggagttgctcagcgcccttcataaaaattcttctggctgagggttctacgttggcatacggttggttccctcttcttttccgaggtggcgagtatctcttcctttgccaagatggcggctccagaatcctctggaggcggcccccgtagatcgtctccggacaagaggcttgctgaaagcctacttctttcctttcacatcagacaatgcacagggaaccgtttacccttgagaaccaaggaaggacggcttaggctacccgcgatcgcgaacctttgccaagatggtggccgcggggacgggctggcgacactgtaccctaccaagatggcggcgggcggcttccgggacgcgcttccccaatcgtcttcaagatgtcagagcagggggagccgccgtcagtctgagcgcggcgggaggtgagagagtggctgtggccgagcgcccgagcaggattaggtggagctgcggcagcccccgcccgtgtcaggagctggcaagcgatgtcacctgtgggggcgcaaaagttacctccccaaaccctaaacccacacagcacaacctttcccagagtcacaaaaatcataatctgtgccgcacaaggtaggaggctcggtcccggcatcgtccaagccttcccgacgcggcgagctggggaagggagctggggcgggggcttcccgcacgggcacccctcgccccacggccctctcctttctcaggacggaccacgagttcccttccccttggactgagggggaagctcctaacaggaacatctgtagggagttgaacgctggcattttaaagctgcctgtattttgttttatttgtaggggcaggggtcctatgaacgtgatagggtgagcaacgcacagagtcgagggcagcaaatgtcaagattcgggggtggggcctgcaccgggaacttggacgcgggccctggccggggtggaagaagaggtcaggagtttcggaaggggggctatatttcgccagcaacttactatttcgcctgcaacttgcttttaagcctgccgccccctgctttccttaatcataataataaaaaaaaagtgcaaagaaatccagctcgctggaggttttgcatttggcgtgcaacttccttcgagtgtgagcacattgggcgggaggggtgggggttgaacttggcaggcggcgcctccttctgccgccgccgccgcctcgcagactcggggaagagggtgggggacggtcggggcgcgggggagggtgggttctgctttgcaacttctctcccagtgcgagagcgcggcggcggcagctgaagacccggccgcccagatgatgcggtggtgggggacctgccggcacgcgactccccccgggcccaaagtacgtatgcgccgacccccgctatcccgtcccttccctgaagcctccccagagggcgtgtcaggccgcccggccccgagcgcggccgagacgctgcggcaccgtttccgtgcaaccccgtagcccctttcgaagtgacacacttcacgcaactcggcccggcggcggcggcgcgggccactcacgcagctcagccgcgggaggcgccccggctcttgtggcccgcccgctgtcacccgcaggggcactggcggcgcttgccgccaaggggcagagcgagctcccgagtgggtctggagccgcggagctgggcgggggcgggaaggaggtagcgagaaaagaaactggagaaactcggtggccctcttaacgccgccccagagagaccaggtcggcccccgccgctgccgccgccaccctttttcctggggagttgggggcggggggcgaagcgcggcgcaccgggcggggcggccacgccaggggacgcgggcgtgcaggcgccgtcggggccggggtggcggggcccgcgcggagggcgtgggggcagggaccgcgggcgcccctgcagttgccaagcgtcaccaacaggttgcatcgttccccgcggccgccgcgcggcccctcgggcggggagcggccgggggtggagtgggagcgcgtgtgtgcgagtgtgtgcgcgccgtggcgccgcctccacccgctccccgctcggtcccgctcgctcgcccaggccgggctgccctttcgcgtgtccgcgctctcttccctccgccgccgcctcctccattttgcgagctcgtgtctgtgacgggagcccgagtcaccgcctgcccgtcggggacggattctgtgggtggaaggagacgccgcagccggagcggccgaagcagctgggaccgggacggggcacgcgcgcccggaacctcgacccgcggagcccggcgcggggcggagggctggcttgtcagctgggcaatgggagactttcttaaataggggctctccccccacccatggagaaaggggcggctgtttacttcctttttttagaaaaaaaaaatatatttccctcctgctccttctgcgttcacaagctaagttgtttatctcggctgcggcgggaactgcggacggtggcgggcgagcggctcctctgccagaggtaagaagcgaggcgggagggggccggggcgcgctcgctcccccgaggtgccgctgggaccggagacaactcgggggccgccgcgggagcctacaaacttttattagcctcggggagtgggggtggggggctggcaagggccgggcgacggtgacgaaagggcagcgcgcgggtgacagcgctggcctcttcctctccctccgcaggcgtcccctggccgggccgagggggaggaacctgacctcggacggcgagcggagccctgtcgaactgccgggggcttcgagcctctcattcctcgcgggaatcctggcctcttttctccccctagtgtcccctttccctccaagggggtcgcccgacacccgttttcgtggtgaacgctaagccgcgtctgaattttactcgcccgaatatttgcacgccaccccggcgcgcccgagcgcgagcccgggctccggggaggccccggcggcgcctggcttgaggagggcgtgcggggcgcgtgagggtgcacacgcggggggctgacagcccgcaacttggagactgcggccggggccggcgttatctgttagaagtgggcgtgtcggagagagaactcaacaggtctggacgtacttctcttttaacctcgcacttttttctcttctccacccccgccccgcaagggcttgctctttagcgtttgttgttaattcgcgcctgaggtttctaagtggccccttttagaaaaagaccccctgtaaccgtaatggttttgtgctgcgatttttacaagtgctagtttgacgtttggggttgcagacttgataattgcaaccttgtaataccacttaagaccctctggcatggttcattagggccaattaatgtggctgggttatttgcaacttaaactgggggataatgtcgcttgagggagcgttttcgttttaggaaatattgttttggtttcgggtttgaaggcagctgtcaaaaaagcggcatggaaattcattgggctccattcgatacctcgtgtttagagatcgttatcgcctcagataaacggggcagagaggtggggagataagcagtttaccctcaagatttgtagtggcaagtccacacccctctctctaccttcatattcacttttcagtgagggccagtgacatttatgctgcctaacgtcatcgcataggaaaagttaccttttattggacgggatttgactatagtgtcccaaatgcgcttctccgtcttagcccatctcttaaaacaccctgattaacgatatactaacagtcttactctcttgagaataggctgagaattgggataggtgaaggtttggataggtgaaggcagagaaaattattttgaacattttactggatacagttgtacctgaatttatatgaatgtgattttacggttctgtgtttttccatttttcagtacttcgatatttgtttggaaaggaaagaacttagagatgtaatagcatttcatattgaggatctcaagcaatgtaaacaaatgtagcttaatctagatgtttttgtgagttatgataagggtcagctatatttaagttatgtaagctaacaacgtagtgagaaactactacaccttctcttctgctctttaaaatctaaattttagttggcctatataaagtgtatctcatttcatatatccaaaatttggaggtaggcacatccagtcagaagtatgggttaaaaagccttttcccagcctgtcggaagataagcagatcagcattgtttatttttcaaagaaaacgtgcatggttcaccagttggttgtactcaaaggtttggatgtgtgactagctggtaggagggaaatttggaagtaattagggattgagaattctagcatagtatttatcaaatgttatatgtattggttctcagaaaagcaaacagccgtgattgaaaagaggtaggaattttaatgatcacacttcctttttttgaaattaaatactttgacatcaacttgaaccttcagaataatcagatgtaatgaattataatgtctgtgattaacaaagctacacgttcagtgagcggcaggatgaatagccaagcttagttcgatacacttttgccctcagctgtgcaaatggattgcattgtacttttaaatgtggcatgctgaatgggagcaggggacatggctttttattctggaagatagaaactactcttctggtaacaaagaatttgattcggagttaactaaaaggttcatttaacaagctgcctcttactaatcggatcaggaagataatgtgactttagagcttatgatgttttccccccgtttttgttttttgttttgtagttgatattcactgatggactccaaagaatcattaactcctggtagagaagaaaaccccagcagtgtgcttgctcaggagaggggagatgtgatggacttctataaaaccctaagaggaggagctactgtgaaggtttctgcgtcttcaccctcactggctgtcgcttctcaatcagactccaagcagcgaagacttttggttgattttccaaaaggctcagtaagcaatgcgcagcagccagatctgtccaaagcagtttcactctcaatgggactgtatatgggagagacagaaacaaaagtgatgggaaatgacctgggattcccacagcagggccaaatcagcctttcctcgggggaaacagacttaaagcttttggaagaaagcattgcaaacctcaataggtcgaccagtgttccagagaaccccaagagttcagcatccactgctgtgtctgctgcccccacagagaaggagtttccaaaaactcactctgatgtatcttcagaacagcaacatttgaagggccagactggcaccaacggtggcaatgtgaaattgtataccacagaccaaagcacctttgacattttgcaggatttggagttttcttctgggtccccaggtaaagagacgaatgagagtccttggagatcagacctgttgatagatgaaaactgtttgctttctcctctggcgggagaagacgattcattccttttggaaggaaactcgaatgaggactgcaagcctctcattttaccggacactaaacccaaaattaaggataatggagatctggttttgtcaagccccagtaatgtaacactgccccaagtgaaaacagaaaaagaagatttcatcgaactctgcacccctggggtaattaagcaagagaaactgggcacagtttactgtcaggcaagctttcctggagcaaatataattggtaataaaatgtctgccatttctgttcatggtgtgagtacctctggaggacagatgtaccactatgacatgaatacagcatccctttctcaacagcaggatcagaagcctatttttaatgtcattccaccaattcccgttggttccgaaaattggaataggtgccaaggatctggagatgacaacttgacttctctggggactctgaacttccctggtcgaacagttttttctaatggctattcaaggtaagatcagtgtttttctgtttcttaagaatggtacatttaaggtagattaatagatgtaaatcttcattgatttatatgtgttctctaaagattcatgtgcttttttatatgaataagtttaagtggccttttgaaagtaggaaaggtagacaacctaagtgacatctgtacgtaaccatttcaggttttttccttaaatagtggttttcagtatcccattggccaacggtgaggattttatttaacatttttaaaataatgttgctcattaacagatatcttaacgaaaaattatataaattcaggagagtataatgtctcataatatcatattgtgttgtgcatggtcattcagctgttttagaatatgttcttatattacaataaatgatacccttacttacatagtcaaaagttgtgctgccttatttgtaaattcgttaagtgttagcttgagattaaagagttaaaagcagaagtactaacaaagagccctattcttcaaactgaatcttctgttaaagaatttgagttttgaagttgctaaagcaatgcagtgaacagtgtaccagaccatagtattagacacaggtcttgctcacagggttcttgccataaagtagacaagttatgtctgctgatcaatctctttaagagaggaattggtgtcaacatggtgcaaaacaaaattttacgttcaaatgttcctgcaagttctcaagtagataactgatggccaaaattgttaagcttcaattttcagctttcgtttgatttttctcttttttttactcagtcgtttataagcatactgatatttttgtctgacccaaaaaggtcagaaaatggaattatcagaaaaaagttctaaatgtagatatacgtgttggtaggggtgaatttctctaccccgtaacctcatccccaattcagataaatgctaggttttatatccattttagttgtgaaggaaaatataaaaatgtggattgtagtgacacaagattgattaatcagcgggtttttttaaaagaagacatggtagacagtgatttatttgtatgtaactattgaagttttttcttaaatgttagtgatattcatcgttcccattaactagttattcagatttttgaaaatcctttttctgtgaaagctatcctaacctggaggatgtctcttttctttcctctgtacttaagaagcttttcttgttagggaaataatttagaattagatttaggctatgttctgttcttctaaaaggcttagttgtcaaaaaaaaaaaaaaaaaaaccaaaaaaccttggttcttacatgtcttaatgtgaactacctcctaatctattgtttaaataattatcctttatttagaagaacactacttcaacctgagttgaaggtttaaaatcttttcagtaaggagatttgagatctttattattgcataagctgttgtgttttaaatgctaaaagacatgctgtgttttaaaattttcaattgcaaatttttggcaatagaattcgcatacttggttttcttaaaagagttaagtacggttgatttgactaagctatctgtaggaaactcttaaattgatttataaaacatgtaattatacaaagaaaaataaaacatcttaggaaactcttggggattattaatggattttgccctgataatcatcatggcatggttttcattttccttactataaagaaaaggcaagggacaaaacttattttccatttgctatgaacttttaaaccctataaaatctgggatatagagtataagtagatgaacatagttactcttaaatcactaaaggtgattttaatgctttaacttttatagtacttcatgacataaagtatctttacgtatttttaatttgggtcccataaccttatggaggtagtaggcaaggcaatgatgatgcggctctttagaagttctttaatatcaaatgaaattattatttttatgccaatctgtgattgggaaatataatcagtagtctgtgtcctaacaagaaggtataatactttatacagggtattttgttaatatttgaagattttataccttatggcattaacttagcactgggaactatgattacccaaaacaaagcttcatccaaataaattgaaacagtgtttcttttaaaccatcattgaattagtctattgtttccaaacaacagccctgatatagctaaaattagttgctttctcttctctatatgttacatgactgtagccaaacatttgctatgaccagtgaccctgagtgatcagcaaataatcaacacattgagaccacaacttgaatactgaccttctgactttacgaagaaaaatattaaatgccactaataacttgaattccttttaaattaaaaaaagttataaattgcaatttgactttttaaaatgccacctaaaattgtttttatcagaatacttaaaaaaaaatcctcactttattctctgggggtgggaagaggcaattccttccttccaccacaacattgaattatcacataaaattgtaaaattatgaatattatgattgagcttagtaaagcattttctaagttcatttatagtaaaacaagagaaaccttattctcaaaatctattctttaagtaaaacaaactagtcattctaacttaatatgcttttaaaaatactgaagttcagtacatttagcataaacttattgacgaaggcacatttctgcattatttgattttcagccttgtttcatttaagcattaatgacagaggtagagaacagaaatggttttaggtggtattagagcttttattgggattatgttgaaattttagtgttaaaaaattgttcgtatcctgaagggagggattattggagagaatgaatgatgtaggatgaacttgtaaattcagttttcggcagagtctaaaattaagtgatgattggcacttaatgaagctactaaaatttatgtagattttaatgtctcattagtaatcgcatctgtatctggttttataaaagtaatgaaattgaagacctgtacaaatacagaatgaatgaagcaaattctgctaacatcatgttgaatgttttctcagaaaaagaggaaatacgaagagaagagatttgttttgactgtgatttaccctcacccccatggatactttctttacttcctaccttttttctttttcttttccttctaaagattctggcaatgggtgtttcagtgttttttaagcttaatatttctggtactcatttatgtaaagtgatttctgaatgttaaaggagatttctttttaaatatattttcacttatttttagctttatgatgagaatcttattttttaaatctgtaacttgttatggctacatgattagtaaaaaaagtttttaaaacacactgtgtattcaggtgtgtcattttagtgtgaaatgactaatgcagaaatatgtgactagcatgtggtcagattttattgaaattacttacgatgtttctatggctagtccccttgtatttttataattggtaacataattcatatgttattttggtcttgtctatttgtgttacatgtattttagtctgaccacttttgctacttatttaatgtttatacattttatgaaagacttattctgaaatataccttgcataaatgtaggttaaatgcaaattgtattaatagtgaaatggatatgtgggtagagatcactttaggggccttttgagatttagtgaaggaaagattggatcaaaagggtttactttaatgtgactgcctaatgtgaaagtcggaacatctgcattaattggttagttacataaatcttagtctactctggcctgcaggtgactgaaacagcccaggaaatcttaatttacattaagcttagacaaggtctgaggcttaggcttagttcttaaagcacattcttttttactttaatgattattcctaattttaatgagcagtgggttctcattgtgtactagtacttaggtgggcaaattaaataagcaaaataggtttgtgctgaatagcatttacccttctgaggacatcctggtaatattttcatcaagagtaattgtgtaatgcaatatttacaggtatttgccagattaatgggcacttgttttcatatttctgagtcatggaaaatatacattgatgattcctgttgcataaagagttttcaagaaaattttgttgaattaagctataactacaaaaaaaaatccattacatattgacctttagaaaggatttttaaaagcccatgctgtccttatttctgcagcttcagagagccgactgctcttattttcttctggcatattctattaatacttgggttttgtatttttcaagtaaataaaatattcctattgagaatttcaattttaaaaaagaaaaggtctactaagtgttcctttccctgttgaattatgtgtgatcatttctatgctaaactagattagggtgtgacttgtgatggtgatttttgttcattttacatattaagaaagaaatagaattttattgcagttcaaaattatttgtagacagtggttttaacccccagacacctaattgtgacaggttgctttccttagtgctcaatactgttgtaaatgtctctaaatacagaatttccagtggagttcatgaattaattgggggtggagggtgaagagggaggagcaacagagatgtgggatgctatagataagtttaggaatatccagatcagttctgaaaactaacagtttggatcaactgtcatgaattagaggtttaagaaaagaaaaatttaggactataggtacaagggaatgcatcaatcagaattacaatttaatttcttttatttcaggtagaaatctaaaactgaccatggctatataatactaatttttgagttatgttgtttcttactatgctttattatcaaaaaaggataaaatgcacattttacttgaagattattttagctaagattaagttcatatttttctcatttttatttaagctgctgtttaataaatgaaaatctaatgacttgaatgtagtcgacctaatgtcttaatgttgatataatcatttcatatatcatagtgcccttttacagccattgtcaactgactggagagcaacccttttctttggtaatatatttctatgggttatgtatttttctgctggaatattgagaaaattaatttttcataatatgcagaataaattatggggttctgcaagtgctagacagtcacttaaaccatttatattgcaatacattccttaaattcagtattttgaatgaaagtgtgttatccccgaattttatcacttgtccaatttaaatattaattacatcccaatagagctgcatgcttaaacatgctttttcagagtaacccaagtattaatttcgagtgcttttaaatattttttctttttagcaagtttcaacaacattaatcctgtctataatgcagcaagttcagtgaaagtacctgttgttttataatttttttttcattctcactgtagggcaccaaaaatatatataaggggaaaaaagttttaatgatatgattagttgtaaatgtttacgcattatcttaccttgaatttttatttttgtaactaataatttgagagttcaataagtatgcagtgtttaagacatagtttgttgcaaaaagtgttaacttactatttctttttacaataaaattagcctttattctagttgatttcataactgtccataatatttagctgtggctattatgaaagtatatttgatagccaaattttgaaagctattatgaaatgatacaattcactacatgatttattatttcatgctggttggggcagtgctgtgacttatgaccttatgattgtcacatgctgaacactaaagctctaccagtttgttatggacactgttttactttatgttatcgttttaatgttttcttttataattattgaggataagagcttccttaattttaagactatttaaattgcagattttgcttttttatttttttaaccatcccttccaaagaatttgatttagatattcagtagtagaaacagaagaaaaatactcaactaaaagtccaaagacctagtttctaatgctaagggagacagtccatggcctccaactaggtactttggagtcaaaaatactttctttacaactgtgtttgaattgttttcaaaacacctgtgtgtgtgtttctaaaattccacaatccttttaacccgtcaatttgatgagggaagtaattagggtagggaatggtataacaaagttggttctttgacattttctttatagattatcgaatgtaagacaaatagatgtgaatgcagatttggtgtttttataagataaggatttaaaataatgtagttggtgatatataaaaataaactattgctgctgttagcacccgagaggtggggctcttgggttctcagagcttgttttctatgttcgttacagttattttagattagaacttaaaagaacttgagagtttccctaattctaccccctaattttttcgaatgagaaattgagatccatagaaagtgttgaggtaaagatcacaaaacacttaatgagcggtgttgccagtttgaatatctcaattcttagttatctaagttccctggtaggcttctttaattatctgggtctcttctagacatctggaacaaatagttgattgacataatacagactagccacatattttataagagttacttttgactcatttagatttttaaaatatacagtgtctgtattcttctctattcattttgttaatttttttttacctaataatgattaagcaccaattatgtgacagcactatgctaagcactttgcatgcattcatctcatttaaatctcaactctgtgaaagtttttattctagttactgtattaagtctcaattctgtcaatatccatgaagcacagaaggcagctgttatttaccttaattttacagatgtgaaaactaaaggcatttaaagagaaaaagaaaaaaaaaaccaggaaaccttaacacttatctgaagggaaatatttaatattgggtatgttagttcctcatgtatctttaataatttttgtcaacagcgaatctttaaataaaatataaaggatcaggcctctgctctcctgcatatatttgtaaagtcacttactgctttttgtcacagtttcaatttctgtaaaatagtgagagggtttttacctgacaggatttgtgcatgtacgtttactttgaaaattaaaaagcattaggccaggcgcggtggctcacgcctgtaatcccagcactttgggaggccgaggcgggcagatcatgaggtcaggagattgagaccatcctggctaacacggtgaaaccctgtctctactaaaaatacagaaaattagccgggcatggtggctggtgcctgtagtcccagctactcgggagcctgaggcaggagaatggtgtgaacctgggaggcggagcttgcagtgagccgaggttgcaccactgcactccagcctgggcgacagagcgagtctccgtctcaaaaaaaagaaaaaaaaaagaaaagaaaattaaaaagcattataaaaatgcaaggtggaatttttaaagctctgccaagtccacttagcttaaaccagcatgactctcattggctaagtacgttatgacatctgtgactgtggtgtaggtattgcctataatcaagaatcttttagggtctgctatgtgcaatccctgaagggtcatggatcgcagtttcataaagactgctgtattttaaagccttcaaatgccaacgtagtatcttcacaatgattttttttttcagttttattattttttgaaagcgccttcgacaaagttttcagtggattttgttgagggatattaagtatgccatctacataatagccatagtgataactccaaccacattgttatatttttattaataaatgctagagtattctctttctggtatttcctattctgatatttttatataatcaagtatgcaaagattctttgtcattggaaaccttaatttgcctgaaaatgggaatgaaattttcaggtttaaaatttttttacatttattacatttattgaagctgtctgaaaaagctcttgagtatattgaataccaaaatttatcctaactgcataaagttgggaggattgtgaaacttgactgcactgacttgttttctttattgatcaaatggttgaaaaaaacttcagttaaacaaatttgatctattaaaccaaagttataaaagcagaggaaagcatagaattattaaacggcagtttaaattggtaaacataccgatgtagaacctaagtttgtaggcagctttcttagatggaaacttaaaaaaattttaatcagaacattatgtgaaatttgtcatctggaattcagctgggtttattaaggacaaagtgtatggctataaaatagattgagttttttttttaaaacagaaaacccaaaataaatgttctaagtttccaccttaggaggctatgtatattgctcctctttgaaactgccttcagaaccaccttgtaagccataaaagaaaatcggactcattgcactatagtaacacctaactgttcttgctcaaagaaaatgtatttatcccttagctttatttgtgtgactccaaatcatatgagtattgccagatatttagaaatttaatcctctctcgaatgataacatttattttctttgagggtttttaaaagagcccacatagatatttctacagaaaatgtttaattctgttttgaatatgcctggaataagtgaatagcttcccagggtgactattctgaaatgggtgatgcttagtggttaagttctgatttgtgttttcttgaagttattaaggaactttatgataacagtttatatattccctcttcttggcatagtaatgaagtaatagagactattcacctctaagcctgattttttaaataagtgtttattttatgtttaagtaaggtaggtctgcttttggcttggacttgaatttggcaatagcagatataaagtaaacataatgtgaattcctacaacagtctcccaaacagtttaatttctcattcatacacatttcccttagtgtatcagggaattaagtatctgattatcagtatagcaagaacaactcaagtatactgaagttatttatactcataaaatagtttgagttatagctacaatataaaattaatatatttttgacttttattcctcacaacctgaaaaaaacctctgcgattactgatagtacttttaaaaactaaatgaattttgttactactatttgctaaatttagtcatgtttactgttcaaaaaatgctaggttaaaatggatcctaatctttgaaatgatgaagacatgtgtagtggtgtcaaaaataggatattcattttgtaactattctgttagtgccgaagttcttagaatttctttgtgacaacagcctgcttaagaactttagattttttagaattgtactaaaagcaaactgttttcttggatatttgttctttctccccaaaagatgatttataagttttcagagctaagaaatgggaaggaagagccatcctagcatggcaggtaatgttttactgctaacaggttttctctgcactgctttatttgccttgaacctcttactttgttctgtcagctgggaggctggtagattttctattaggtagcaaatgcttctcatcactaaacacatatcatgggctggtgttagtgcagtctgtggatgggcactacatttttaatcaagaaatgtttttaaaggaaagacaaattggtgaagtaatttctaattcagtattttagggatgagtgaccttttaattgataatgatatttaacagagctgtacagtgctttgggggtcccacagacatgtttaaacaagaaaacagtaaataaggaagccagaaggaaaagttataaaactattaagaaagaaaatgaaaattctaaacttcaattctggtgcctggctaaatttgatttttgtatgcctcagtgtttctctatggacactgggaaatcaataagcaacctagctacgttattatgttcgtaagtggaagaactaaagaactacaaagacatgttctaggccaagaattctggtggtaggtagagtgggaggttaactagatgatctccaaggtccttctaattgcacttggcagcagcaagcatttatcaagctagacactgggcatatggagatgaagaagatgaatatccccagcagcatggagagcactctgatgatagtcatccctgcctccccctccctcagtttgctttttgaaatgtgagcttgaaagatctcaaactccttcctgggaagacataactgaaacttcatggaggaaagtgcatgaatgaatgggaaacaagatttgattcaactatttggaataagaaaaggggcaacaaggagtctgaaacaaatgaaagaaaagatggaaagaattagttgactagatgaggactgagtacataggaatgagccaacaggagacttcagcaactaatggatgaaagtattatgtgcatgcatgttgtcatcaaatatcacatgatacaagacaaggagaaaacatgactttcaccataacctcagtttgtgtaccctagttgcaagatatttttttcttctagtcacttaagaatatccttattgtctaggagaaataatcctctttctgggctccccagtgtataagcccaaatctgaggaaaatttacctgaaatgttctttccccagatacccacatggtttactctctcatttaaatgtcagctctgtaaaagagatctctgactgctctatctgaaatagtagaatctttcacagtctttccttcttcttgacatcatctatttgtgtcttatctgctcacctgctacaatgtaagctccatgagagcagtgatactgtctgccttgcttactcctgtatgccagcgtctagaatagtgtctagcacatagtaagacctctacaaatacatgttgaatacctaaataaacaaaatttaacatataaaccaaaaagatatataggaatggattatatttctaatctttctcgagtgaggaaaatgtcagcagatagtgaatatcactgagagagagatgatagcccaggttatcttccccagatagaaataagccttaagactgacaggtgtatatgaatacagagagtatacataaagaagatgtattttcaattgacagtctctaaatttgctttaagacttcgaaatggattgcttttcataatttcttagaataactctggtctgtttaccattgaaaaattagagtagccaatgtttgtaaatgaagggttagagggttttttcctttggtggtttgttaaaagcttgctcaaggcagtaacatagtaaattgtcaatataggaacttttgtagcagaagctttatgcttttcacttttataagaattgagattatttaagcagatgagtctaatgtatatgtttgtactgacttacctagaaggtcaggcaagaaatcggtttcctcatttttcagataagtgtgtgtgtaatcactgagtaccttaagagaggaggggtgttttatttttgcctgaattttcaaaatatctttcttcagcttatttatattttagatttgacttattctgtctatagtatataacagtcaggaggttggtaggataagttcatctcttctactaagagttataggagagttcaacctaatatggcaatgacagtcgcagaaaagagaaaatgcaagttaagtaggtgttagccatagcaagaaaatcagatgaggtcatttaagaatgaactgctctaatgttcaggaaaaaagaggggagggacaaggacagggctctagaaggcaaccaaagagagcagccacaaaataaatgaatagctgaagaattaggagacaacaatcttaaaatgtggcagggagagggtagttgtcacattaactagcatagaagagacagaatagaataacataaatatatgagtgattattgttcttgaaaccagtctttaaaacatgggaacattcccaaaaatcaaagccagataaattagggaaatcttaaatggcacaatataactagtgatttcgtttataatttttttaaaaaggagacttaaatttgaaatttagatgtaattaaagcagataataagaaacatacttctgagaccacaaagaccctgagattcagttaagagtaaggtagaaaggctggaagccagaagggaattaagtttctgttccctgagaagccaacacaacaggaaaaaactggccacaccctagttcaaactcttattactcttatcaatagtctcctaattgtttctctagttttctcctctcccttcttaattcattctgcagtctactgccagattaatcttcctagaacaccactttcagtattattcccctgatcaaaaaatgtctgtggttttgttgctcatagcatagtggttctccttctttgtaccacagcccatatgcacgatgatagatggtgggtagccacatgaactctccataacctttggaggatttgggttatacacagtctgttatccaagaaagcatatctgagtgtaagtgagcattatagggatagtcttataattgactccttttaaaatttgttcttctttttgcaaatgccccttcagaatttacagaaatagtgtgttcattccatcagtaaaattataccccaaaatgttaataagcttatttccatcacgtctcctttcctatttctttctttcctctttcttcctgcacatctccccttatcctccacatttctctgtaattacataagcataaacagacacatatgagattttctgggttgcttgcctttaaataaaagaatgggattatcttatacccctttgtctgcagcttgcttttctcacctaacaagtacaccctgaacatccttccaggttaacagatgcggatcccattcttttaaatagacaatattctattcatgtggtttcgtgatttttgccactacaagcaagtttctaataaacacccttttctatgtaccctttacaaatagcaactttttttctaaatataaatgctatggtttggctctgtatccccacccaaatctcatcttgaattataatcctcacatatcaggggaggggcctggtgaaaggtgattgaatcctggaggcagacttctcctctgctgttctcatgatagtgagttctcatgagatctggttgcttgaaaatgtatggcacttccctcttcactcactgtctctcctgctctgccatgtgaaaacatggtttctttgccttccactgtgagtgtaagtttcctgaggcctcccagtaatgcttcctgttaagcctgtggaactatgagtcagttgaacctcttttctttgtaagttacccagtctcagttagttctttatagcactgtgaaaatggactagtacagaaacttggtaccaggacagtggggcattgctataaagatacatgaaaatgcggaagcaactttgtaactggataatgggcagaggttgcaacagtttggaggactcagaagaagacaggaagatgagggaatgtttggaacttcctagagacatgttgaatggttttgaccaaaatgctgatagttatatggacaataaagtccaggctgaggtggtctcaggtggagatgaggcacttattgggaactggagcaaagttcacttttgctttgctttagcaaatagactgacagcattttgcccctgccctagagatctgtggatctttgaacttgagagagatgatttagagttcgtggcagaagaaatttctaagtagcaaagcattcaatatgtggcctggctgctcctaacaacatacagtcatatgtgttcacaaagagatggtctgaagttggaacttaggtttaaaagagaagcagagcataaaagtttggaaaatttgcagcctgaccttgtggtagaaaagaaaaacctattttctggggagcaattcaagtgagctgcagaaatatgcatagatgaagagtagcctaatgttaatagccagtagaatagggaaaatgtttccagggcatgtcagagaccttcatggcagcccttcctatcacaggcctggaggtctaggaggaaaaaatggtttcgtgggccaggcccagggttgcgctgctctctgcagcctcaggacatggtgccctgcatcccagctgctctagctccagctgtggctaaaaggggccaggagataatcttgggctgttgcttcagagggggtaagcctcaaaccttggcagccttcatgtggtgttgggcctatgggtgtgcagaaggcaagagttgaggcttgaaagcctctgccttgatttcaggatgtatggaaatgcctggatgtccatgcattctgcaggggcagagccctcatggagatcctctgctagggcagtgcagaggagatacatggggttagagcccccacacagagaccccactggggcactgcctagtggagccgtgagaagagggataccatcctccagactccagagtggtagatccactgacagctttcaccatgtgcctggaaaagctgtaggcactcaatgctagcctgtgaaagcagctgcagggtctgtacccagcagagccaccagggcagagctgtccaaggccttgggagctcaccccttgtgtcagcgtggcttggacatgagacgtggagtcaaaggagatcattttggatttttaagatttaatgactgtcctgcaggtttttggacatgcatggggcctgtagcctctttgtcttaaccaatttctctagtttggaatgggggaatttacccaatgcctgtatcccaattttttcttggaagtaactagtttttgattttacagtctcataagcagagtggacttgccttgacccaagaagactttgtacttggacttttgagttaatgctggaaggagttaagacttccggggactattgagaatgcaagattgtgttttgaaatgtaagaacatgagatttaggaggggccgggggcagaataatatggcttggctgtgtgtccccacccaaatctcaatcacttgtaatccccacatgtcaggggaggggcctagtgggaggtgactgaatcacaagggtggacttccctcttgttgttctcatgatcgtgagttctcatgagacctggttgtttgaaagtgtgtggcacttcccccttctctctctgtctcctcctctgccatgtgaacatgtgcttgcttctccttcaacttccaccaggattctaagtttcctgaggcctctcagtcatgcttcctttgaagcctgtggaactgtaagtcaattaagtctctgttcttcataaattatccagacacaggtagttctttattgcagtgtgaaaacggaataatacaatagatttccccaaagttgggttcctgagtcaggggtatgtgtatttaaaattttaacagatatttccaaattacttttttcgaggattatggcaagtcacagttccccctggcagtgtttatacttttctttataataaaaatacataaatcattattactaacaaattccttgccatgagtcctaaattgataacaacataccagtgtgccatataacatagctgaggactgttgcagtctagaattcaggctccttctctctgcttttaacaatatgtgtaatgttcaagaccaatttagtgccacttattttgtatgctttcctttatgtagtccaggccatagccccccacctcatctgatggtatcctctggcagccacagaccacacagttctttctacctaaattagtcattagcacatagtaggtacccagtaaatgtttgttgaattaatactgtttatatatttctaatttatctccaagtaaatccagtctccttaaggacaaggaacgttttcactataacacctagcacttaaggtactcaatttaggtagggctgtttgaacaaagaaccacagaggaagcaaatagcatggccttgcctttaatacatatattttactttctcttagggaaaactggaactgtaagaatctagtaacaataataagaacagcacttttattgagcagttactatatgtgaggcacagttcaaactgcagaggatacaacagtggacaaagctttagttgtttctgcctttctgaagcttatggtttatgggtgttacattcaagacatttgtaggacacattctaaaatgccatccaatttcaggctctttccagcagaaactgtggaatatttttccgttcattcagcatttacttagtgcctgctctgccaggaattgaagagaaagcccaaagacaggcagaccttacctgagaggtagtgaactgaccaggatgactgtgggcagtagacttgtttcccaaactagcctcaccatttctgtatttgcatatacgaggaaaggattagatatagggattcatgtcagcatacaccccagggacatttgtttttagtgaaaggtgccagtcttcatccctgtacccagtacacaaaccacgaagaagtatgctcccgtcattgtcaaagaatcatagaattccaaatggagctagttttgatatccagatctcacttcatatgaggaaactaggtccagtattgtgagtaagaattaggactcttcagattccctgggtatgaatctgactaacaactgtgtgaacttgaccaaattcataaccctgtaaactctgtttcctcacttttaaaatgggcacaacaaagtgatgcatgtaaactgcatagcacagtgtctggcacttaaaaagcactcctgaagttatttttagtgatgtgttttaagattagacaactccttaatgccaaaggtttttacttgagaactctgtctgttgtgccatactacacgctgttcataagataagcctttttcattaattgatctcaaactggcttcattatgatcttaactttatttcagttttatttttaaaatttatttttaatttttatgggtatatagtaggcatatatatttatggggtacaggtcatgttttaatgcaagcatgcaattgtgggggtgatatataattgactggggtgagatatctcattgtagttttgatttgcatttctctgatgattaaggatgttgaacatttcttcatacacctgttggccatttgtatgtcttttgagaaatgtctattcagatcttttgtccattttttaagttggattgtttgattttttcctgttgtctgaactctttatatattctagttattaatcccttctcagatgggtagcttgcaaatattttcttccattttgtgggttgcttctttgttgtttccgttgctgtgcagaagttttttagcttgatgtgatcccatttgtccatttttgcattggttgcctgtgcatttgaggtattactaaagaaatctttgcccataccagtgtcctggagagcttcccaaatgttttcttttagtatcctagtttcaggtcttagatttagggctttagtccatttttatttgatttttatatgtggtgagagataggggtctagtttcattctgcctatggatatccagttttcccagcaccatttattgaagagactgtcctttccctagtgtatgttcttggcacctttgctgaaaatgagttcactgtaggtgtatgaatttgtttctgggttctctaggtctgtgtatctgtttttatgctagaactatgttgtttgggttattatagttttgtagcataatttgaagtcagataatgtaattcctccagttttattttttttgttcaggatggctttggctattccggggcttttgtggttccatataaatcctatgattttttttttctatttctgtgaagaatgtcattgatatttattaataaagattgcattgaatctgtagattgctttgggtagtatggacattttaacaatattgattcttccaatccatgagcatggactatctttctttttttgtgtgtcctcttcaatatttttcctcagtgttttattgttttcattgtagagctctttcacttctttcgttgagtttattcctaggtgttttattttatctgtagctattgtaaatgagattactttctgatttcttttttagattgtcctctgttggcatctagaaatgccacagatttttgtatgttgattttgtatcctgtaactgtactgaatttatctgttctaatatttttttggtggagtctttaggcttttccaataagatcatacagtctgcaaacaagaataatttgacttcttccattccattttggattccctttatatctttctcttgtctgattactctaggtaggtcttccagtacttccagttgaataacagtgggcactcttgtcttgttgtagatcttagaagaaaggctttcagtttttccccattcagtatgatactagctgtcagtttgttgcagatggcataactttcaaactaattgattatagttaggaagtggatactttaacttgtggtaccattatcagatttatatttcggccataagcttgaagaggagctgaaaaatgcatatgtgatgcatatgcttcctatttggctctcttctcccacccccctgccctataatccacacaagttcctctctcagtcactcatcaactacttgaacctctgaggaacttggggttaaggtaaattagaataaaactgtctgaagaagagcaagcctttcatgtcttgagaaattcttggggttttagaaataacttcattgctttttttctccagttactttggcttcttcttaaagagaatactaacactttgaacgtcataatactaaggttctgcctcttcaaataaagactttaaaaaaaaatggtttttgtatgattcagtgtgaattaaatcccacagtgtaaaggactttactttcttaatgtagattttcaaatacacaattactgatgtttataagtagatttattacaccaaagcacctagcaaattcttgaatggatcaggtcttatttttcagtcttactttgcaaatttaagtcaaataattaaggatttgttaaatatttgtcttaatatcaagcttttgcatatcggggccctcttttataagctttataagcaatcttttgttttctctgcttgctcaaagtagctatgtttgttgtatctgttagtatttgctctataacaaacatactgggtgccttcccacttagatttggcaattatcactcctgtaaatgagatattacataagataggaaaaagaacagtatctttccaagaagaatagtatccttccatattaacagtttagagctgactgcttttaaaatttagtggctttaaaataacaaccatttattattcttcatgagtctacaaatgaggtgggcagttctgctgatctggccaagctgaacttatctcagctgggcacattcagcgtatctgctgtcagttggctggttggctgtagcaatgaatggtgaaagtaggctgcccttaactttttcacacagtagcattagagttacaaaagaaccagcagaaccatgcaaaactctttaagacctaggcttggaacaactatatttctaccacattctattggtcaaagcaaatcacggggctagtctagattcaagtgggtggaggagctgcaattacactgcaaaggagtgtgactgtagggagaggtgtttttttatttttatttttttgcgatttgtcacagtagttgtaggaatcaggtgtatttaaaattctgatccttctgtgatatccgaattgttcatgaaccttgcctctggtggaaaggcagaatcattgtgacagaaggataaaatcttggaatttagagactaacaaaggttcagattccagctccatcacttatttctgcaatcctgcagaagttaatcttcctgataggcattcagtaatgattgattcacctgaacctcagattctttatgtattttaaagaaagggctaggtaaatgcaaagcacttatgtaactgcttttattattgcaaacctggctcccacactccattcaaggtgtaagactcagtgtcttccttgaattaaaaaggaagagaaagtgtgttagggaaaggaagagaaatatttgactaattgtggccccaataaagtgaccactcactgggggtattttcctgtaagaaaagaatggttgaggctcagagttaagagatacaaatccaaaagtctccttggggtaggattccctgtgattcatgggttgagaggtgtaacattagacacagtcccagtctagattttttttttaaagaattgtagtccatcctatacacactgggtgccttaatactatatgtggcaattatcactcctataaatcaggttttacataagataggaaaaagaacagtatcattccacattaacaattgaaagatgactgcttttaaaaaattaaaagggccatatagaaataaaatcacataaatttcttgtgttaaacatagttgtcatattggatgaggactaaacacctaaattcatccaactagtagtaatagaaaagatgaaacacacacacagtaaaactagattaatttaatttatacaaagggccagatatctcagaattcagacagtcagagatgttgactagagttaatgcctcttttaggagaggtaccaggtaagtgttctcaaagaactggaaactgagaccaccacctctggcattatctatttgtgaacacaagcaagtctgaatttttccgcaccatagctacctttcatgtaagcttcttttcttagaagaaaagaaggtaacatttgggtgtaattttttattaagggtgaaatttagtgtagagagtaaaggcatttggcatagaagcccttagttttttttgtttttaagttgaactgccagcctttatggattgcagtcttcgctgttttgattgacatttcccaattcattttgtattatttatttttttaagagacagggtctcactctgttacccaggctggagtgcaatggggcaaacttggatcactgcagccttgaactcctgggctcaagcaatcctcccacctcagcctcccaagtagcttggactataggtgtgcaccaccatccttggctaattttttaaatcttttgtagagacagggtagtgctctgttgcccaggctggtctcacattcctggcctcagttgatgctctggtctcagccttccaaaatgctgggattacaagtgtgagccactgcacctggcccccaatttcatcctttacaaagactactttcaaccataaatcaacggaaacttcagctccctcagacatatttgggatccaaggatattttcccaaatgattaatgctaatttcatatcaatacatttttgcaaaacctacaaaaatggactagtaaagaaagactcttaatttgggaaagacagttacttggagagaagagaaacttaagaggcaggtcgagttcagtgttcagaaatgagaggatcataaagagatagccataaaaatgtttctccctatattgcctgctgatagggtgtatcagtgaaggtcttactaaggaccttgtaccttttcagcgctgcactgcgtgctcatagggaggaaagataaatcatgtgttttttctgacctcaaaggagcctgtatctggctagagagacatgatgcagacacatgaaataattaagaaacaattaactgtagcaggtgctgaagaatataccaggaggtcagagaatggtagagctagtgtgggcgaaggtatagcccagagcatcatcagatgattcttccttatgcaaattcacatctcctctgggtcaagtatcatcctggcatgcagcagctccataggtaatgccctaaggctagcctgaggcaagttgcaaaagccatcatattgagtcatggcctttttttgtgtggggggaggggaatggcatccccttcctgtctgccaaatcaaggaatacagtgccctcctaaacctgctttgttttagtggattgttaaaaagaagtgaatgaatttatgcttcattagggaaaggttacagtggaatactgaggagtaaggggtatttctatttaacaaatgacataacttgaaggaatgaaatcataaggatggaatttcaggcattaataaaaagctgatgagagatactttgagacaaaagagccttcccagtgtaaccgagatcacagcacctacttcacatacacaggaaaccagtcctatctgtctctcccatagagcagtagctgccttgtttttcctccctcctccatcattcattctaaatctccagtcctccaccgcaccttatccaaaccctgatacccttaagtcacagatggtgaatcagtcaaaagtagtattaaaaactagtggtacacagctacacctggaatgcagtaagaaaaatacggatttctgtacatcatcttccctccctgctcttacccccatttaagagttacagggtcagaacccaagagtctgagtttttgaaagtccctaaaaattttggatgatcacctacatttagaaccactgcactaagaaggacaacaaatatgccaataaattctgttgccaaggaggtgattatgcaagctggaaccctgataacatgaggagaatcccacaatagccaaatagtccatgtactagttacattataataaagccaaaagcagcaggcctacctgactttctcctgaggtctatcatgagcttagagagaaggaacgtggacatatagaggtagctctagatggagaagggcactaggtgtcatggaaagaatcatgtgcaagaagtaaagaggtgctctgaatgtcctagccctgcttaggtgtctgtgtcctcacatgagaatttatccacagttctttcccgctgtaacaatctttggttccaactgcatttgtgagacagcaaaaagctatggtccagtctccttccattgtatcatctcatcaatgtatttctcccactacccttgtgtgaaatacaaacttttttggcttattgtgattatgcaaggtgtatgccaactttttttttttctccacatctttcagctttctgatgggtaaaaattttccttattttgctttagaaaaattctcattggcatagatctaatttcagggagcctcccttgaaagctaaataacattgagaattcatgaaaatataatgtagagcattatgcctgttagcatattagtttaaatagaagtggttcatgaaaatttttgaaatgccagaccctgtcctgtgttttgtattctcccaaatactcatccagatactgttcagaatgtaacatgattattttgaaataaagattttcccctagtttttaaaaaagttactttatacattaacccttatgttcctctttgatcaatttttccagtagtgtaaacagtcttcagggaagtagatttcttacagaaattgtcaagtggctctctgctgttagcatggttactaatcttttggttacttttcatattttttatactttctggaagtggacaacttacttgtaaataaaagtgcataatttgtattaaaaatttttagtaacaatctaatttgtaaaatagatgtgagcagcatgaatgtgtgtgatatgcgtacatacgaattatgtctcttaaaaatgtatcacagacatctttccgtgtccaaacaaatctacctcattctttctaatagccatatgggtataccataatatatttaactaggcccctattaaaagaattttgactcttttgtagctactatagtgttgcagtgtgtatctgtgtatgtatctttgtgtgtgtatctttgtacgagtgtacatatattttccccttggctatttcagatttttttttaggtttaaatcttaggaaaggttttgaaattgtcttaagtattttcagaagcattaaatcatggtttttttacatttttcttttagaagttttatgtcatctctatgagtagctttcagtaatttgttctgcataaaattcccgaaaacttccatttaaaaataggtggcatgactagactttctcagccgaaagagtgaggtcccaggaaggattttggagaagctgtgttcaaatatagctgctgacctgatgtctgcctagagtctggcaaggtgatgtgttgaatctagtgtctgcctgcatgccagcatccctttactgatgagatttgtggttttcatcacttcatggtaatcatcccaagttataagatggagtctctagaaaatcagtagagtatgaaggcccaagtaaaatacatgtgagtgcatgtatgtgtgcatacaaattacttctcttaaaaacgtatcctgggcatttaaagaatgaggacctccgaaggattttgtggaagctgtgttcaagtacagctgctgagcgtatgtcagcctggagcctggcaaggtgaagtgttgaatctagtgtctttttgactcactgttttttttgactcactgtgctttgaagcccttgtcatttgggctcataaaatagatttctgtatactgtctctcctccctgccctcgcccccatttaaaagtatagtggcagaacccaagaatcagagttactaaaaactctctagaaaatttggatgatcacccacctgatcatgtcttttttactcactatgttttttttttttttgagacagagtctcgctctgtcgcccaggctggagtgcagtggcatgatcttggctcactgcaagctccgcctccctggttcacgccattctcctgcctcagcctcccatgtagctgggactacagggcctgccaccgcgcccggctaattttttgtatttttagtagagtcggggtttcactgtgttagccaggatggtcccgatctcctgacctcgtgatccacccgcctcggcctcccaaagtgctgggattacaggcgtgagccaccacacccggccctttactcactatgtttttaagcccttgttttcatttgctccactgtaaaacattccccaagccaatctggagctgaggcaaatttttaacaatttaaaatctggggaatataaatattggataatgatcatcctgaaaaaacaatgaaggtagtagcataatactttatatatcaataaaatggcaaaataagacagttgttgaaggacagaaagagtaactgaagttaggagcttatcttaacacattttttgtgtcataccataggcatcatattttttaaattttttttatttcatacacataggaaaatatatgtgtgtaagaaataataaacacctctttgtacctaccacccaacttaaggaacagctcattgctattccctttggtgctcgctggatgccctttcccagtcacatccccctcccttcccatctgcaggactatactagtaaattttgtattttttgcattattttgctttgttttatgattttactacctatctacatatccctaaataatacattatttagtttcatatgttttaactttatgttgtggaatcacattaaatgtagtcttttttttttatattatactttaagttctagggtacatgtgcacaacgtgcaggtttgttacgtaggtatacatgcgccatgttggtttgctgcacccatcaactcgtcatttacactgggtatttctcctaatgctatccctcccctagccccccaccccccgataaatgtagtctttataacttgtttttttaactcaacattgtttgtaagattcatccatgtaagctgaagcttttttatagagatctttgttaagccttttaatgaatacagtacatacatttctctgttcccctgttagtggacacttggattgtttccagagttttgctgttttgaacaacgctgctgtgaaaatgtctcctgaaacacatttataagagtttttttttccccaagggaattatacctagaaattgaataactagatcacaaggcatacacatctacaacttctgctaggtaatgccaaattgtttccaaggagcgttagaagtgttctcatcaacttttactagtgctagtcttttacatttgtggcagtatggtgggtgtgaaatatttatgtttagtttttcttggtgccatttaataatttttataaaaaatatttagaagtcaaggcagttttttgtttttgtttttattttttgcttgttttgttttaatgcagacattgagattacgacttggaataaacattggttgcaaagttcctaaaaggaaaactttttttggtattctggagcttttctggtactgaataaaataagtatgttaaattatgcatgtgtagtttagaagtcagagcaataattgtgattgttgaacagaatggcagtaaaaagtttctaaacgattgtactgtacaagggacacttgttgtgggtcagttttagcctccccaacttttatgttaaaagttgcaacaaggtttaagggcttatgtttgataggccagatggtgaccagctgtgataaaacacagggaacccttgcaaaggatttcaaaatttatgcagtagtccgccttatctgcagttttgctttccaaggtttcagttacccgcagtcaactgtgttctgaaaatattaagtgaaaaattacagaaataaagaatcgaagagttttaaattttatgcttcccacccatcccacctgggatgtgaatcattcctttgttcagcatctccatgctgtaggtgctgcctgccccttagtcacttggtagccatccaggttatcagattgactcttctagtattacaacacttggcttcaagtaatccttattttacttcatagtggccccaaagtgcaggagtggtgatcctggcaattcagatatgtcaaagagaagctgtaaattgcttcccttaagtgaaagatgaaaattctagacttatatataaagaaaagaaatcatatgctgagactgctaagatctatgataagaatgaatcttttatacatgaaattgtgaagaatgaaaaagaaatgcgtgctggttttgctgtcatatctcagactgcaaaagtttgcagccaatgtgtatgataagtgcttagttaaaaggaaaaaggcatttaaggtaagtatatatagtgtttggtactacctgtgatttcaggcatccattgggggtctcctgagtataaggggagactactcttttagtgttaaatgaacactaaggaacagagatggggaagaggttggagaagattagttcagcagtttgagtataggtaaacagttgtttgagaaagaagaaaaatgtgattagtattttaccttagcaatagtggcatagataatgataaattatagtcacacagaactcttagtatttacagaacgttcacatttgtgatcccatttaacaataactctgaaagaaaggtatcatctaccactgctttattgataaagatataaaaggtaagagagatgaaacatattggccaatgatacccatctggtaagagacagggatggggtgggaccccaaggctcttctcgccaagcccacggtttttttgctttatacttttttgcctcctgatcaccatggctgcagtttctactgtggacaatgtctgtcagcaagcattgatcccctgccttcagcactcttacgtcttagcaaggactggaaagaaaaagccaggagtttacagtctgctggagcaacagaaaagaatgatatgaaatatgaagagaccaaaatgatttataataaggtgctagactatgtagtaaaaatctgctttagctgtaagtcaaaagcaagagcagtcttttcagaatggaatagaaatgttggaattaaaggaattttcaaagttgtgaatttttttcaagataaacatgttttattttggtaattatggtattactaatttgataaccttcagggagccacctaatattatagaagatgtacatataatgacaaaagcaaacattttatttttaaggaccacaatctaatctaaaacaaaatttcccccttttctggtctttggttaattaaggacttatttaaatatcaaagaaagacacatagaaaacatttagtatatttctatacttttattaatgtcctccataccttacacagatacttgacttggctatggtctagataatccatgaaaatttaaaggacagattttaacaactttatgctaaattgatagatctctaggatcagattgccatcactctcagatgcgaagcttccaaccacttataggttcctgatatcttgcttttatacagacctaatttctcttcctttaaactttcttttcctcagttgctatttgattgaaatattgagtcattaaaaatttccaagtgggaatttttgtgtttcttcatctatcatgaagctgctcaaataagtaggtgtttgaataggagtagaaacagtaataggctgaagccagaccaatacagcttcagctaaatgccgaccttgctaaagtctgggaggaccggtgtggtattctacaatgtacaagtctgtagccggtgcccttaatatgttggcttcatgtctcatgactctcttctgtaaatatgcagtttaaaaaatacaagttattctgctgtagaagatacatttgcaaaattgatgtatcccctctaagtaaagttggctaaacaataaggacatatttataattaatgaatttgagaagaatgctgacgatatgcattattctttgaagttaacatttttcaggtcctaaataaacaaaaagtaggttacttctgtctggagtgtatgcaaggggtaccatcttgtccttggttcctggctgctattccaaggtgctataaagtcagctaaagagagcaatcataatacattgatagcatccctcaatgtgtttctgagctacttgagaatcttatttttgaataggtagcaggaaaccatctttgcagggcagcatgggcaaagggattggagggactattattataaagatccactgaactgcttcagtatcataatatcttaaactaaaggactggaaagagccagattccaatttaatctgctcttctatgaattcttagctgggttcatttaaaaagaaaaaacttgaagattgcaagattttgaagacatcttaaaataggtgaactccaaggtgcactttaaacttgagactgataactgaatactccttcaccttttgatctgatattgtcaaaatgaatgaggacttagtgctctagtaagtttggaacagaatgatattaatttattttctcatgattgattcttttttgctttttaatagattaaacttcaccgtagaacagtttctcaacctctggactattgacatttttgattggataattctttgctgtcagggctgttctgtgtgttgcaggatagttagcaacatccctgacaatcacaaatgttactttctgtctctatggatttgcctattctggacatttcgtataaatagaatcatatatatgtggcttcttgtacctggcttatttcacttaacatgttttcaaggttcatccatattgtagcatgtaacagcacttcattttctttttatggctgagtaatattctgttatgtggatatactaccatattttgtctatccactccttagctgatggtcttttaggttgtgtccattctttggctattataaataatgctgttaagaacattcatatacaagtttctgtgtagacatatatctttatttctcttgtgtggatacctaggagtagaattactggatcatatgataactctatgtgttaccttttgaggaactgccaaacatttttctacagtggctgtatcattttacactcccatcagcaatgtataagaattccaatttctctgtccttgcctatatttattaactgtcttttcttattagccaactgctgtggttcgaatgtttgtcccctccaaaactcatgttggaacataatccccaatgtggcagtattgagatgtgaggcctttaagaagtgcttgggtcatcagaggtctgccctcatgaataggctaatccattcatgagttaatgtactaatgggttatcactggattgggactagtggctttataagaagaggaagagaactaatctagtaagctcagccttctcactatgtgattgctgccctgtgtcaccttgggactctgcagagagtcctccagcagcaagaagttcttcatcagctgtggccccttgaccttggacttcccagcctccagaaatgtaagaaatccatttcttttttttaataaattacacagtctcacgtattcagttataccaacagaacacagactaagacaccatcctattgggtatgggtatctcattgtgttttttatttgtgtctcccaaatgactaacgatgttgaacatcttttcatctgctttttggacatttgtgtattttctttgaagaaatgtctttaacattctttgcccattttaaaattaggttgtctttttattgttgagttgtcggtgtgtgtgtgtgtgtgtgtgtgtgtgtgtgtgtatctagaatatatgtgtatgtatatatgcagatatattctaaacactagacccttatgaaatatataatttgaggacaatttctcccatttaaaaggccatcttttcacttcttgatagtgtcatttgactcacaagtttttaatttttatgaagtccaatttattttttaattctttgtttttggcactgtatctttaaaaagttgcctgatctaaggtcaaactgattttcacctatgttttcatctaagaattatagttttagctcttacatttaggcctttgatccattttgaattaatttgtgtatatggtgtgaagtagggctctaacttattcttttgtgtaatgatacctagttgtcccagcaccatttgttgaaaagattattctttccccattgaatggtcttgataccttgttgaaatcaactgaccataaatatataggcttattcctggactcacaattctatgagtctgtatgtctaatcttatgccagtaccacactgttttgattattacatctttgtacaaagttttgaaattgggaaatgtgagtcttccaactttgttcttttttaagattactttgcctatattccgtgttcgttgcaaactcatatgaattttaaatcaactctccatttctggaagaaaaaaagaggcaattgaagttcagatagggattgcattgaacctgtagatcagtttggggaatattgccatcataacaattagtaggtcttccaacccatgaatacaagacttctttccatttctgtagatatttagtttctttcattaatattttgtagttttcaatataaaagtcttgtacttcgattaaatttattcttgaatattttgggttttgatgcttttatgaatttgttttcttaatttcactttaagattgttcattgctactgattagtaatgcaactgatttttgtgtgttgatttttgtatcctgcaacctagctgaaatcattgattagcataatagagtatttaatagatttaggatttctatatataagatcatgtcatctgcaattagagataattttacttcttccctttcaatctggacattttttacttctttttcttgcctagttgccctagctagaacctccagtgcagtgttgaatagcagtggtgagaatgagcatctttgtgttggtcttcatcttgtggggaaacctttcagtttaagtgtgttgttgtggggttttcatagttgtcctttatcagattgagaatgttcctttctgttcctagtttgttgagtgttttctttttgattgttttaatcaggaaagggcattagattttgtcaaatgctttttctgcagctattgagatttttgtgtgtttttctggtcttttatggtttatcacattaattgattttcatatgtcaaacaaaccctgtgttcttgggtttcatctcacttggttatggtttataatcctttttatatacttgtagattcagtttgccagtattttgttgaggatgcttgcatttatatttataagggatattggtctgttgtagctgaccagtaagtatagtaagctgtatagtttactaagtgttccctctgttttgggggagactttgagaagaaggattgttggtaattgttctttaaacatttggtaaaattcactagtgaagccatctggggtcttctttggaagttttttgattactaacttaatgtctttacttgtttgttataagtccattcagatttttttctccttgagtcatttttgacagttggttgaggaatttgttcatttcatgtagttatctaattggttagtgtataattattcatagtattcctttataatcttatttttttgctgtaaggtcagtcataatgttcactctttcatttcggattctggtaatttaagagtcttctctccttttttttcttggtcagtctagctaaagtaaagttttgtccgttttcaggggaacagctttttttttttttttgaggcagaatttccatcttgtcacccagtctagagtgcagtggtgcaatctcggctcattgcagcctccgcttcccgggttcaagagattctcctgcctcagcttgccaagtagctgggattacaagcgcccaccaccacgcctggctaattttttatatttttagtagagacggggtttcaccatgttgggcaggctggtctcgaactcctgacctcaggtgatctgcctgccttggcctcccaaagtgctgggattacaggtgtgagctaccgtgcccaacccagctttggttatttttgttgacctactctattgtttttctcttctctatttcacttatttctacactggtctttattattttcttccttatgcttgctttggacttagttcttctttttctagtctcttaaggtggataattaagttcctgatttgaattcttacttctttgtaaggtggtcatgtactgctatgaatttccttctcagaaatgtatatgctttcactgcatcccttaagatttggtatgttgtatttttgttttcatttgtctcaaggtatagtcttctgatttccattgtgatttcttccccctctaacccgtttattatttaggaacttgttgatttccacatacctgtgaactttccagatttccttctttgttaattctcagtgtcattccattctggtccgagaacatactttgtatgatttctatcttttaaaatttatttggcttgtcttatgacctaatacattgtctatcctggaggatgtttcatgtacacttgagaagaatgtgtattctgcttttgttgggtagagtgtttgacaggtgtgttggtacatagttctgttcaaatctgtttccttgcagatttctatctagttgttctgtctattggaagtaggatattgaaatctccaactaatattgctgaattgtttattgttttcttcagttctgtcactttttgctttatatattttgaaattctattgttaggtacaagtaagtttatgattattatatcttcttgatagattgattcttttatcattatacagtgccctataagaacaatttttatcttaagtctatttgtctatattagtatagccacttcagctttcttttgtttactgtttgcatggaatattttcttcttttactttctatttgtgttcttgagtctaaggtgaatctctgtagatagcaattggatctgccaatctttgctttttatttggggagtttaaaccattgacatttaatgtaattattgatgaggaagattacttctgatattttgccatttgtttcctttattttgtgtctcttgttcttaaattcttccattactaccttctttcttttgtattacatattttctagtgtaacgattttaatttctttgtcatttcttttgttgtatgtttttagttattttcttagtggttgccacggagattttattgtcattttaacagcctaggttgggcacagtggctcatgcctgtaatcccagcactttgggagactgaggcaggaggatagcttgagtccaggagttcaagaccagcctgggcaacttactgagatactgtctctacaaaaaaatacaaaaattagccaggcatggtggtgtgtgcctgtagtcccagatgcttgagaggctgagttgggaggatagcttgagcccaggaggttgaggctgcagtgaactttgatcacaccactgcactccagcctgggtaccagggcaaaactagcccaaagaaatgaaggaaaaaaaaaatctaatttagattaatatcaactcaacttcaacagtgtataaaaactttgcctctgtatacctcttctgcttccactctgtgctgttattgtcatagattttcatctttctacactgtgtgtttatcaatgtagatttaaaaatattgcttagtagttgtctttagaatccgatacggagaaaaggagatataaacaaaagatgcatttttactgtcttgtatgtttacttatgtaattccctttcctgatgttgtatttctaaaggcaaagtagggttattgtgagtgtccttttgtttcaacctgaaagactccttttagcatgtgttggagatatgctaatgatggactctcacagtttttgttatctgggaatgtgttaatttatccttcatttttgaaggatagtgttggcaggatacagaattcttggttgacatgtaattctttcagcattatgaatatgtcatcgtactgtcttctgacctccatggtttctgataaggaatcaactgttaatcttattgaggatcacttgtttgtaatgacttgcttgtcgtgctgctttcaagattcattctttgcctttagcttttggtagtttgattgtgatgcatttaggtgtgtactttattagtctgttctacttggagtttgttgagctttgtagatgtatttcatcagatgtgtcaagttcttttgccactattttttttttaaataatctttttgcccctttccgctccttctgtcactctgattatttgtgtgttgctttgtttggtggtgtcccagaagtctctgagactctgtccagttttttcctccccattcttttttctttcacttcctcagactggatgatctcaatttgacctatcttcgagttcatggattttctcttctccaagtgacatctgtgagatgaatttttttctagagaatttttcatttcagttattctacttcaaaatttctctttggttcagttttatcattgctatctttatattattctcagtttaatgagatactgttttatactttcctttagttctttagacatagtttatgtcactgaatatatttaaaatagctgattttaagtctttttttttttatttttttggagatggagtctcgctctgtcacccaggctggagtgcagtggcacgatctcagctcactgcaagctccacctcctgggttcacgcaatgattttaagtctttgtctatgaagtctagtatctgggcttcctcaggcatagtttctgttttctttctttcttttcctgtgtacttcgtttctttgtataccttgtaattgttgttgttaactggacattttgaatattatagtgtaacaactctggcagtcagactgtctcccctccccagtatttgttgttggtgagtattgtagatgtttgtttagtgacttttcatggctaattctgtaaattttatattctttgaagattgtgggcaccctgaagtctctgtttgttagtttagtggtcacctaataattaacagagatttcattaaatgcctagaagcaaaatatcttccagtctttgcccatggcctctgtgtatgcattagggcaggccttgaactcttacccagggagtttacaaccctgccttagcctttactaccagcttctgcagagcattaaggtcaacaggtggtgagagtttggagcctactccatctttcctgagcatatacacagccctactcatgcatgtggccctctagatttccaggagtatgttggaccctttcaaagcccttacagactccccagcttttcctctcaatctttagactagtgtgttgttttcttcaacagttatctgtcaggcagcagcaaattaagagattagcataaatgttttcaactcctccacccgtcatgtgccccagggaagcactaagccagttctaagttaggcaaaataaagacaatccttttgaggtggtcttccatggagtcaccagacaggtaaaccaaataattaattacaagtctttggctggatacagtggctcacacctgtaatcccggcactttgggaggctgaggcaggtggatcacaaggtcaggagattgagaccatcctggctaacacggtgaaaccctgtctctactaaaaaatacgaaaaaataggtggctgtggtggcgggcgcctgtagtcccagctactcgggaggctgaggcaggagaatggaatgaacccaggaggtggagcttgccgtgagccgagatcacactactgcactccagcctgggtgacagagcaagactccgtctcaacaaaaaaaaaaaaaaacaagtcttcatgaaagaggtccattctgctgtctttcataccaggaatgtggaatgtggactgttattttcatggctactgctaagctaggaatcaagggatagatggggactgggtaaaacaccacagagtttgctgttcttaccaagaataagctggggaagagggttgtttttgtttttcagtaaaaattccctgggctgcttcaagccgttgattaattttcaggttccgaaaaagttcagtttgacagtttttgccctttttatttgcttttatggatatgtagaacttgagttcttttttccaccagttttgctgacattgttttaaaagcactttttgtaaaacccaaatgttgtctctctcaaggctagccaataattaaaaatactgttactcccctttgattttggaaatgaattcgtattgaccaaaattcaatactagaggtctttcaagctgttttaccatttatctaaactttagaatctaatgattcctgtacattgtctagcatactggtggtcctcaattgtcataagttcaactttggaacaaatgaactttttgtgtgcaagtttccaattgtttggaaattacattgatgccccctccatcaaactgttattcgtgggacatctaggaatttcttacagcagctgacaaatatttcaagtcagtgcctggtagtactgtccaccaggcaacagcttcagtagtagagcgatctttatctataaggcagtgtttgagcaattgtttattagtgttttcctaactactcagaagaactatcaggggttatagaggtagctcagagagttgggtgcaagtagagaaatccacccggcttgcattacacatcttatttctagagaagctttcctttgaagaaggagttctaaggtttaaaaaattaccttgaatgccacttatattgcattttaattttattttagagaaatcaatggaaagtagaaaaattaaggcactgatactagtgttaagaatgttggttaaagcttctggcaattaattttttatttccttttttaattttattaaaatttaacaattttcagtttatgctgtaatccagaccaaggtttcaatctaatgaagttaatgccagtgttgctgctacctattttgtctttagtcattcagccatgcttcctacttatactgaataagctagcttaatctaacaatcaaaaaagaaagctgttgcctaagttaagaaaaacagtttgaactgttttcaaactaaatacccagtagactctctagttgttgacaggagaatgcttaattcagaattgtcctgcagtagatcattttatctcattcctgttcttctataggatagcttatttgtttgaaattgtatttaatatgttgtgatttttgtgtgcttgtttctatttttcactggatagactcaagataaaacctggtaccctgcagtgtagctatcagtttatagcagaggaaatttacattagaacttggctgtgtatttacatgtatctaacttggaggtcactctgcttactgttgatatatcagtcatattagatgagtccctaatgagataccagaaaccccggaaacatcattaggtggaacagtgtccttaatgctttattaagtgttataggtaagacaaagcctagtactatttgtggcatcaaggttaggtgtttaaagacctgtattcttctattgtcatgttgaaattgttcccttgatgtagcaatagaaaattttagattaggcttaagttaatcagcaaacaaagataaaagtctgatactatcctaaatattttgtgtttctaaataatttaacagtgatccaattagctactcctgtagaaatgtaattgataaacttttcactctcttttaaattgccatcttgaattttacctgttttttaaagctgtctcaagtcctctctaaaaaaaggcagtcatttataaatttagaaaagcttgatagcacagaaagtcacagaaaaatgtaaacatagtttaaaactgaattgtatacaagccactagaagtacttttattaagtttacaaatattagtagagtggaactcatgcatttaatatgtttgaaacttttgatcaaatactgtgctatgaaaaacattttagataattattctttaatcatgtgtgtgtaaaatgtggctttttttgacaaccaagtagcttttctgtgtgccaaactgtgactttaaaattttaaagtactcaacagagtaaacaaaccacaaataccacttaaactgtacacatttgcacatgcatttcctataaatagtacatgggtttcaagtcttcacttttgaaattcagaaatgggttttttctccttccagtagaaataaaaacttgatttattttatttatttatttattttatttttgagacggagtctcgttctgtggcccaggctatggtgcaggagggtgatctcagctcactgcaacctctgcctcctgggttcaagtgattctcctgcctcagcctgccgagtagctgggattacaggtgcctgccaccatgcccagctaatttttgtatttttagtagagatggggtttctccatgttgggcaggctggtctcgaactcctggcctcaggtgatctgtctgtctcagccttccaaagtgctggggattacaggtgtgagccaccgcatccagctaaaaacttgatttttaaaaatccaaatcgaagacagaattgtgtattttagtacatttattagcagccttgacgctataccatatggctgtttatcatttaaacagcttgtaaaagcaaacacttcaggattcatgagtggcagaaggactgagtactttgggaaataagagagaacttttgttgaggatggttgaggaagagtccaagacaataataggcagaataagcaaaaatctagagactcattgtaggcactcaagtatgtatttgttagaatgaatggctgaacttggtatattgaggaacactgagaaagccatactgactggaagatagttcctacaagaaactggtgagacatatgttacagtctagattttggtgagccttgttaaagtttgggctttatttttatacggggagaaagtttcacaggggtttggaaatgaggcttggagctgttaatggggacacagtgaggttttagggtagtggctttcaaactgtttaaatccaaactttgatgataaccctgacataactattgtttataacttccatttcagttgtattggttttatcaaaacatcttcattgatcttactgattgcttcctatgcagattaatattataaatttgaatgtacaaaggaagctttagcagtaaaatagcaacttttatctgtcttacgtattggaggttctgcataagatttaattttttttttttttgaaatggagttttgctcttgttcacggggctggagtgcaatggtgtgatctcggctcaccacaacctctgcctcccgggtttaagtgattctcctggctcagcctcccaagtagctgggattacaggcatgtgccaccatgcccggctaattttgaattttagtagagacggggtttctccatgttggtcaggctggtctcgaactcctgacctcaggtgatccgcctgcctcagcctcccaaagtgctgggattacaggcgtgagccaccgcgcccggccaagatttaattttttaaaagaaaatattttgctaagggtttggaaactcttgttttagcaagaatggattaagactgattaaaactaaaggcaaagaggaggctcttatgtttggaattctttgctaatatttacacaatataattctctccacaaatatttaatggtaccagatattagatggttataatggcaaaagtgttcaaaggatgctatcatattcatgattcatgatcaaaatgaacattataaggctatccctcttcagaattaaatacgttactcctgtggaaaacttgcttttaatgtagaagttgtcccagagcctttcttcctttctcatgtcctcttatgtccactgctgagctaacatgggtctcactgaatgattaagaaaaaacatcttaggtggggagttctgtatatagtaaatgtttaatttattggggtggtgaacgggaagtgctgctggcaagagaggatgggaagagaaatctacccaaatccttacccgctttacagaacataaacttcctattcagtagtacacaataacttaacgatcaaggcatcttaacttttctgttttcagatgaaagaactatcgtttggcttgatcaagtatttagtatttattcgttcactcaagtgcttacgtttttttgttatctcagggttttacgttagttattaaccaaaagaactagttttagttctggaagtctaaaatatataagagaaggtgaggagtaataagagaagatgaagggagactttcggaatggcctatgaacttctagtaactataccaccttaaaatagacaaattacaatgcagttatgaagatatgtatttttcagtgaagacaactaaaatgtttgcacagaattttcttttttattgagtgttagaaattctattttggagatactaccttgcacaacataaaaagaaaaagtgagtgtggaatctaggaatctacgtggctctaggaaattttttaagtgtggaaactgaaggagagcaagagaaagggagcatggcattcccctgtttgtagttcatgaggtgggtttaaattgccttttgccaatgcagctgcacactgaggattacagaattctttttaaatgtttgtagaattatttttcacttattaggtaaaacgtgtattttttgattttctccaatttcagctttctcatgttgctatgctcaattttgtataccatatatagttttgttaaattgacaaagtggtgttttttgttcttctttttcccattggttaaaatttaaagagaaagtggaagctagaaatttatctaaaaaatgtaactttccctgtaattattaaagtatcaatctaaatttgaattttctttgtgcataatcttttttcaagctatttaccatgttgacaaacttgctttcctgtggcaaatacactagcaatacgttataaatatgtaactttcaacctatttacagttgatgcttttttagccctttggatttaaaatacaagcactgaagaggtgaggaagtaccactgctgcctcagcattatttcgaaattctgtttataaactatacaatttccaaggtcatgaatccagcacctttccaggtactaactattgggacaaagatagaatttgattttatttatttacctattgactgaagtctaacttaaatcttgcacctagtaagatcttagaaataacgtgtgtactctgacctgtaaactaatcctagtattctgtgtgtatattctttctcatttgggctcttaaaaggaaaagtaacgtacatctgatgatcattagcactgagctttttcagcaaaaagtatatgtttataaagaagtataggataatttagtaatttaataatgtgacaacatttgcgtgtgtttttttttttgagaaatacaaattgtgagaaacagaaaagtaaaagaagcagcagcagaaatatcactataggatcaaaagattgcaggaaccaaaactccaaaattattgggcataatgtactaaaaacagggcagtggaggaaagggacagtccagactagctctgagggtccaaagaaagtattaaatattgttactggagtgatttgctctgctatttgggcttgggaattaagtgaaattgttgatatactagacagatacttcccacccatttttctcttgataatcagggttcattttttctattttctatttctctggatgctccatttcttaatattaatattaatattaagctctcagtctttatgctaaaaattggttatttaaaacaatttaaatcaacttcagtctaattggcttaagttcaaatccattttaagatcgatattgtgtcctttaaaaattttatttaaaagatatttaaactgatgagaggatactacccattccactgataaactattactgtaagtttgtctattgagggctagttatttggtttaaaaatgctgagattatggaaagtggattggaatattttggagcaatattaaaaacagtatctgtaacaatttaataaacttataaattcctctttctctgttgatctatcttgaaaagacactctatgtctctaggcattccttctctgtggtgtgattggtagacagggagtaaacaacttactgtaaatgggcaccatgccagttggcttcaggcagcatcaagcttgtgactcacagtcagggttaggaaaatgccttttaacttgtttgtctctgcctcttttaaacattaaaggcacaactgtactaattattaagtatttcataaggtcttttagggcttataagatcttttaggaatggcctggaagttattagtactgtttcattgaatctgaatacctttaacatgataatgagaagtttttaaagggtggttttatagttaaacggaatttctcaaattggcttgctccttatgttgatttatttaggatcacatttgggagtttctctgccctactttcaatgtatttaatttactgaccatcactatttggggggaaaatgttatatgatatttagaaaccaagagttttggagtttttcccccattagatgtatttatttatttatttattattttttaaagacagggtcttgctctgtcacccaggctggagcacagtggcatgatcctagctcactgtattcttgaactcctgggctcagactgtcctcccacctcagcccaagtggctaagtatcaagtaagaatcacctggcaaattccaaggctgtataccagatttcctaaattagaattttggggttgggtatctgaattttagtaaagccctccaaatgtttctggtattgcttctaagaacaattgataacataatagctgtggccattataggggtattctgtcatatttagatataagcataccttgttttattgtacttcccaaatattgcgtgtttattttgttttgtttcacttacaaattgaaggtttgtggcaaccctatattaagcgagtctgtcagtgccatttttccaacagcttgtgctcattttgtgtctctgtgtcacattttggtaattctctcaatatatcaaactttttcatcatttttgtatctgttacgaccagtgatcagtgatctttgattttttctttttttttttttttttgagacggacttttgctctgtcacccaggctggagtgcagtggttcaatcttggctcacagcaacctctgcctcccaggttcaagcaatcctcctgcctcagcctccccagtagccgggcctacaggcgtgtgccaccacgcctggctaatttttgtatttttagtagagatggggattccccatgttggccaggctggtctcgaactcctgacctcaggtgatccgctcaccttggcctcccaaagtgctgggattaccgtgccagcctgatgttactattttaattgttttcaggcaccataaacctcacctgtataaggcaccgtacttaattgataaatattgcgcatgatctgactgctcttccaactggccattccctgtctgtctccctcttcctgggactctcaaatccctgagagacaataatattaaaattaagctaattaataaccctacagtggcctctaagtgttgaagtgaaagagttgcatgtctctcactttaaataaaaagctagaagtggctaaacttagtgaggaaggcacatcaaaagccaagacaggccaaaagcaaggactcttgtactaaacagctaaattgtgaatgcaaaggaaaagctcttgaaggaaataactagtgctactccagcaaacatgtgaatgatcagaaagtgaaacagccttcttgctgatacgaagaaagttttagtggtctggacagaagatcaaaccattcacaacattcctttaagccaaagcttaactctcttcaattctatgaaggctgtgagaggtgagaaagctgcagaagaaaaattggaagctagcagaggtcggttgatgaggtttagggaaagaagccagcgctgtaacataaaagtgtaaggtgaagcagcaagtgctgatacagaaactgcagcaagttatgtagaagatctagctaagattactaaataatagattttccatgtagatgaaaaagccttttgttggaagaagatgccatctaggactttcatagctagaaaggagtcaatgtctggcttcagaggacaggctgacattcttgttaggggctaatgtagttggtgactttaagttgaagccaggtctcatttaccactccaaaaatccgaagacccttaagacttatgcttaatctactctgcttgtactctagaaatgaaacaacaaagcctggatgacagcacatctgtttatagtatgcttcactgaatattttaaggccactgtaaagacctgttcaactgctcagaaaaaaatgattactttcaaaatattgctgttcattgacagtgcacctgggctcacccaagagctctaatggaattgtacaacaagatggatgttgttctcatgcctgccaacacatcatccatttgtagcccatgaatcagggagtgatttcaagtttcaaatcagtacattttgtaaggctatagctgctatagacagtgattgctctggtggacctgggcaaagtaaatcaaaaaccttctgaaaaggattggccattctagatgctattaagaatttgtgattcgcaggaggaggtcaaaggatcaacattagtagcagtttgaaagaagttgattccaacagttatagatgaatttgaggggttcaacacttcagtttaggaagtcactgcagatgtggtagaaacagcaagagaactagaattagaagtggagcccgaaaatgtgacggaattgctgcaatctcatgagaaaacgtgaatggatgaggagttgcttcttatggacaaatgagcaaataaatttttttcttgagatggaatctactcctggtgaagattctgtgaaccttgttgaaataacaacaaaggatttagagtattacataaacttaattggtaaagcagcagcatggtttgagtggattcattccagttttgaaagagtttctactgtgggtaaaatgctatcaaacagcatctcgtgctacaaagaaatcttttatgaaaagaaaagtgaaacttcattgttgtctactttaagaaattgccacagccaccccaccttcagcaaccacctctctgatcagtcagcaggcatcaacactgaagcaagaccctccacaaggaaaaagattacaactcactgaaagttcaaatgattgttagcatttttaagcaatattttaagattaaggtaaatacatttttaaagacacaatgctattgcacacttaatagactacagtatagtataaatataacttttatatgtagtgggaaaccaaaaaattcgtctgacttgctttgttgcaatattcactttattgtggtctagaaccgaacctgaaatatctcagaggtatgcctgtattaatattattttgcaagtaaaaaacccagcatataaaaaaaacgtagaatatgttgagagttcagtaatatggatgaaaatgtttttctctaactgaagaacatgataaattataattagggaaggatataaaccaagaaaatatgtctgagatagccaattcttgcagttcataatatgaaaactcattataccaatctcagtaagaatacttttaatagctgttatttctttgggatatagaatttataaagtacacagtaatcttcttatgatcaatcctaggatcactttacaaccacttaccccatattacaatgtagtaccaagacaagcagaccaaattatagaaggacaaagtttttgctaagcatattttgtcatcagcataccgcattgtgtgtgcatgcatgtgtgtgtttgtgcatgtgtgtgattgtataaaatattagaaagccaccccagaaaagttaaatgactaggaatgttgtgaagggattaagctacccctaaaattatataacaaaactctcttcatctattattaggtcatctttagaacatcttctcttaaatttgttataggtctctctcatctgtttggattaaaattggtctgaaagcctaaaatggctttttacctatataattatttcccaactagcttgtagtataggtgcaaagctatcacacttgctaggttagtgaagtatgtaaaaactaccatctttcaattaggaaccatcggatagcttctacaggattgctggggagaacctttataaagaaagttatatctttataaattttttgtcattttacttagctgagaatataaaataagttagctaataatagagtagaaatgttttctgtaacagattaatattgatcaaatgtgttattaaatgctaaaacaccattttttttctctgtaagccatgtgtttcatgccacaacacaaaagggacaattgtctgtgttttatgacagttctgttctgtcagatgctgtttgttcattttggtgaataaatgaagagagccctggacacatctttttttcctcaacaaaagaggaaaattattcttgtctgtatgtctataatcctgactctttgaatggctttaatttttttaaagtcagcatttttttataaagataggtgtttggaatgtgggcgatatggctggacagttagattgggaccaaataatggaaggctttgaacatcatgctaagaggtttgggttttactctgaaggcagtagagaaccattatgtttttaagccaggattgacttgttctaagctgtaccttagaaatattactctggcagttgtacataggatgagctgtatgttgctttgttttgtttggggagacagttctcgaagagagactacatacgaaggcagttatatgagtcattactaaaggtctggcaagaagtagtaaaagcattaactggagtggtagcagtagggaaggaaataaaaggatagatgtgggagtcatttggaaagtatgaggcaattcattgaccttacagaatcactggttttctgcttccactccattcacattgacctttccaaggttatcagtgacctgcttgtccttaaattcagtgggcactttccagtaacctactgttggcaccagccctgtgctagacaccaggatcctgtttgtaaaggcatctgccagtggtttctgtgacacaattctgtttctagttttcctccttctacttctctagcctcttggcaagttcttctttcagagtttctcagagctttgtgctaggccctcttctcattttctccttctctaagtgatcccatccttttctgttgcttcagttaccatttgtccttatgcaaaggacagccatatctactgtatctccagctcagatgtatctctttgcctcctgacccatatttccaactatctaactgggtatcttttcttggatgagttataggtctctcaaacacaacatgtccagaataattcattgacttattctaaggcctgcttcctctttctcctgtagtccctatctcaggaaatatatggtgctatcaaccccaaagcagaaatctggacataatccctaactacccttttcccctctctgtgcacataatttcagtcattaggcctcatagattggactaaataaatacctcgcaaacccttctacttatattcttaactgctcctaccttaagccaggctaccataattttgtagctggatgactgcatcatcatcttgactggctcccttgtcatcttcaatctatattctatactgcagctagagctttcaaacataaacatgtgatcagattagtcccctctttagaacaccctagggttctcactgtcctgagtacagtctaagggtttaccatggcttacagggtcttttatgatttggtgagctttttattgtataacctttctaaactgcctttacttccctctttcttggctctgtgtctttgcataatgctgttccctatacttcacctcacgtctaaccttcatctccttttcacttctcctcttcctccaaaatccagctgaatatcacattgtcatgcaggcccattcttgatctcccacgtttgggttagatatccctcttcagtaccatcaccgcaccaggtgtgtcccctatcctagcatttgcctcattgtattacaactactgtgtactcgtctctacagctcctgctagtctaaaagttttgggagagcaaaggttcatgtttgtgtttttcactgtggtataccccagtgcctagtatatgataagctctcaaaatatttgttagatgtatgaagaaatgagaaagagaacaggaagagggtaagtttcaagactaggaaacaaggctatgaaagctgcaggaaagcagcaggttaaaacctagaagaagagtttgttttaggaaatactgtgttttaaaccactataactgaagcaaaaacccaaggcctgggtgtggatagagtccactatctgataacagtggatactgatgcatggcagagttggagaggaagagagccagattccaaaacagaaggggtaaagtcttctaagaagatagattatagtaagaaggattaggggatagaaatatgagcctgttccactcatagatctcaaacatgaaatgatgagtcatcatgaagagagtaggcaattgtccagtgaagaaggggatgctaacccttcttaaccttgaatctctcaggtagaagcagttagagaaggaacagccatcatcagatagtgttgtaaggaaaatgatatccttggggaaacctgcattttggtaaagcaaagcaactaagaaagaatatactaccactgtttaacaatcgccacaaaaagacagtaggatcatctttgacccccctcatcctttctcaggaacttggaggactaagaagagagaaatctgtagaagaggcttctctctctgatcctccctccacttcagttttaccacatgtaatgcaacaataattaagaatttgtgtaaaatttcaccaggttggcatgcatggagagaaaaattattcagatgttttcctttgtcaataatacaaggagcatttgtagggaaaaatatttacaaatacagtaagacctattctctttctatatttatgggaaaattttaagttgtgcccttgtttcatgtgtgtttctatttaaagataccatacttaatatatattgttgattcattaacattgaactcatggctaacagcactataaatcatgtctgatcaaaacttatgatacatgtactttcttcgtaaggtacatcatagtcttctcgtacatgggaactctaggtagtacttcaggactatgcatagaggccattttaaacagcaaaattcccaacaaaaagcacaaaactcaaaaaatgtgccactaaatttaccatgaaaaggacacttgtttacagtttgagagctaaaacaagaaggtggcgtgtcacttcgtttgacttcagctgggaacatgcatatcagtcgactcaaattttttgctattctgtgcttatccacgaatcgataggaaagcaagtgtggatttgggggttacaaataaaatgtagcaaatgtgtaaacttgcagatgtggaatctacaagtagttagaatcaactatgttagtctgatcattaaatcagttttttaaagtactattgtaacaccttataacctgccccattcactgagtgttgtagtttatagtttcattgggcattttcagtagttttatctgaagtcacatttcaaattttgtaattgaagctccaaagtatgctaccggaaacacgagctgatgctgtgagacaaaatcaacaggtaatccaccatcacaactgtgggctagaatgctcaagaaaccttggaggcccagagagctgagatgaatactgaagaatcataggcaggtttactctgtcaagctgcctgtattttgagggtgtagtcctcaaaccaaaaagacaccaaatgaacaaactcagatggcctcactggggaacagagattgaaagctgacactggaatgtgtacttaaaaaaatgagagcccgttttggaaaggcagactgggcacagaatgtggagagctatatttgctaactgaagaaatttagactttatcctctacaaaacaaagctattggtttttgaaggttgcataaaagctgcattttagcagcatatattttggtagagctgttacctgcctgaaaacatcaatgtcatttcacacaaatgatacttatcccttggtgtttgatctaaatttctacaatgagaatgtgattttatagtctttactggggaaggaagtaggtttttcaggccgaaattcttgtgtagcaaaaattaacacttaagttagcccttggcaatctccagttctataatggtaaaatggatttcccagaaagtcactctctatccctttgaatagacattagaaataacatgtactttaagtgggatttacagaggaagggggcctttaattctttactagtgtgatgccctgtaaaaaaataactaacattagagttgaggcctagaaatagcagcactgggttaaagtctgttttcaagtgcaagtttttctttttattcgtgtgtgtgtgtgtctgtgtgtgtttcacatagaaggaggaaatgccaatttcagttcttacaaatattaatgactgcaacttataaaaatgttacagactatattcttcccttttgtaacagatgagaagattttgaaatttagtctctactttttagtttggtaagacaatttgaataaactgcaataattgcaaaagaattctgaatatttgaacatttgacattttctatgtcaaatatacatttcttgtactatataaacattctagaaaagagagacaggcagggaggaaagtgctcattaaaaagagcttcaccctctctgaaaagggatttcctttacagtgctgtgtactaaagcctgtgttgtaaatcagaaagcactgagcacacatgttgctgctttggtagcatcagaagtcgattttcattagccttataccattcactatttctgccaagcaatcttaaattataaaagaatcttatttgattttgtgattctcttgttttctgctcataaagaaaatatcctaaattgaacaatggcatgctacgtttttagtttttaagacagctaatgtgtaaaaagacatttaaagtatagttgtgttaagtttttgaagtttacagttgtttcaattttgctgctatactttgttaacatattttaggaatatttcattttagtcacaactaggatataaacattattttggtggcgatctccttgtaatcacgacgtcaaccaaatttgggaaattttgatttgttagatttataaattttacagtaacacaaaagtctaatttcctatatattttcaaggcccctatacctttgtcaaaataaagtatcaatgaaaaatgaaaaaatcataaactatgttcaggccaaactgatactgactttgttaaaaggctagatagaaatctgttttcctcttctgttacatctcctcttctggagaccactctgtgtggactgaaggtttgagatcctaggacctaggctagaacagattaggagattgtgctgtatgttaagtggcagataccatggaattctaagcctgttacgaaggaggagaagaagaggcacaatgaccctgacacagcccctgggttgaccacagcagatatctcacttgagcaagtagatatcatctcaattgcttgctgattatctctaacttgtcagtaacttactttgataacctagatttaggagtctgacagcatgcagtgtatgcctcataataatctgctgtttatgaaagtcataacattgtatgtttagcataatggtgaagagcctgccatctggaatggtctacttatttgggatccacatacagtaagctctcacttaacatcatcagtaggttcttggaaactgtgaccttaagcaaaacaacctctaatgaaaccaattttaccacaggctaattgatataaacaagagttaagttcctgtggcatatttctggtcacaaaaacatcactaaacttctaaataaagacccaaaacacttataatattaaccactgaaataaatgtgagctatatatatacatttaagaataataaaaacaaaaaataattatttacccaatttttggtgaaccagtgagtgatagtgatcatagtgatggtggatgaaatcaaggaataaatatttgcaaagtgaaaattgtaagaagcaccccctgtcaccacatagctcagaaataataattagggcaggcttgctgagcatttttaaactgcactgtttattgtcatgcatttgaatgattatcgcagactttatgaattttcattttatattaatttgtaggccaggcacagtggctcacgtctgtaatcccggcactttgggaggccaaggcaggcgggtcactggaggtcaggagttcaacaccagcctgaccaacatggggaatccccatctctactaaaaatacaaaaattagccaggtgtggtggtacacacctgtaatcccagctatttgggaggctgaggcaggagaattgcttgaacctgggaggtggaggttgcagtaagccgagattgtgcccctgcactccggcctggtgacagagctagactctgtctcaaaaaacaataataataatttgtattcattcattttccaatgtgttcattccagttcagggtccagggggcctgcagcttatactcatagctcagagcaactgaccctatagacaggacgccaccccattgtagggtgcactcaaatgcacactcacactcaaactgggacccttcagacatgccagttaccgtatcacacacagcttcgggatgtgggaggaaagcgaagtatctggagaaaaactacacagacatgggaagaacgagccaactctacacagacagtggccctggacagagctgggcaggcatcagttttttttcttttttttgtggggggtgagggtggggcatggagtctcactctgtcacccaggctggattgcagtgcagtggtgtgatctcagctcactacaacctccacctcccgggttcaagagtttctcctgcctcagcctcccaagtagctgggattacaggcgcccgccaccacacctggctaatttttgtatttttagtagagacaaggtttcaccatgttggccaagctggtctggaactcctgacctcaggtgatccacccgccttggcctcccaaagtgatgggattacaggcgtgagctaccgcgcccagtcagcatcattttttttttctcatcaacgttaaaacaatgttgaacaaaacattattcaaagacctgccgtatggctattttctagttgtgtgactttctttgggaaagttagcaaccctttctgagcttaaatgtcctcattcataaaatggggctagtaataatgcataaggtttttgtaagaattagaattaataaagtacttagaccataataactaattagtattagttgttgtctttgctattattttgatgtggtggttgtttggtttcacctgtgtactatcaggacatgctgaaataaaatttaagaattggctttataatattagaaaagcaaacttttgtacgatatgggtatgaaaaattgttgggagtctactttttctctcttacctaatttgtcttagtctttttaaagcttagattttccaaatgagccatagcaaaatataatgtttaaaaatgtttaaattctaagcactatgtcatagttaaataacttaaaggtgctacatcttatacagtccaaaaggaacataattagtaaaattctacaatttagaaaaaaaaatagctgacagtgactgatttataaaagtaaaatatcttttgttaatactaatattctttttataaattaattgatgacaaaaaattgagtgaatgagatttgcagttcatttatctatgatgctggtttatttaatctctataatttgctgtatttgaaagagcatagtgatagaggtcatgataaaatctaggcccagtgccacaactaaatccctgtaggaactctcaaggttttgatttcatctctgaatgggaataacaccttccaagaatattatgaagattaaaaagttacgtatcataaatacacacagagtaacaatactgggaatattgcaacttgtaagaaagaggaagcatatggcatattctgatggttagggatatggactctgtagctgggatgcctgaaagagaactctgactccactaatggctagttatatgaaattgtgcagataatttaacttctctgagtttgcatttttctttgtctatataatggggataataatagtacctacctcacacatagtgttaatttctattagtggttctcattaagatagtattgttgttcatccctggttgttagccatcatgtatctgagttagagagtcattgattttagaaagtcccgaggagactatcaggtcaagcaacctgcctcctgctagacaattagctttatccatgagttaccaaagagggagccgaaacccagggaagctgaaagagctgttgattgtcaccctgtgagttggtgatagaaagatatctggaatcccagtagttgcccatttcctagttctgggctctgcattgcactagaatactgtgccattctaaatatgaaaaggcagtatgaccattgtgcttgtcactttccattccctagatgctatcttatatttgtccttatgaaatttaacctgtgactttcagatcacttagaaccttggttggacagtgttttctagtgttatttagtatatttttttgtcatcttctgttgtctttgggttcccctaaaagagctatactctgggtgccaggaaacttcacacatgactgtcttctcttcctcgacttccctctctacttacctttccagctcgtagcaaatcagaagacttctctgacacctctctatgtctaaaggtcctttgatattctcacatggcggcatgaatcacagtgtattttaactggccttttccttgtatgtctcctacaatgagctgttgaagcttcatgaaaacacaatctgttttactcagggcagttataattccaattacaaagcacatttcctggctcctggctaggaactcgatcatttttcgatgcttccttgctcaggactttctgattccttcttaaaacattttggggcatctccttctcctggtttttggaaacatattctcatactgctatgaaggtttttactgacatttccaacttctcttaaattgattcagcaaatgtttttccataataaatgtcattgatatgtcatcaatatggagagcaacaacagaatgcattgagtaaactcctcccctggaggtctgagaatctagattccagttctcacagagccaccaccttggtgaccttggacagtagaccttctaagcctcagtttccttatcccttaagtggggatattaatagaacccattctcagagatgttgccaagattaaaataaccaagataattcctgtagatgatttggcatagtgcctgccacgtactaagcaagagttagcctccgtcattatagtatgatcataaaaaatgaacagactaaacgaagtaaccagaaggaaagaaattttaattcttaaaatgtaatagtttcttggtttttttttttctgtgaaacacctgcatggcacctttttgttattcatactgttttgactgtggctgtcgtagattcttgttgaaagtctgagagactgagacttgtcattttgaacatggcatcagtggaacagcttatgattcaataattgcatcatcctggacaagcaccagtagaagtgagtcaggacatgtgataaaaagacattcattttgcccctcctccctctctgtattttctttgctataaaattattgatgttaagcccatagtactaatatttcagttcaattcataataaaatttgagggcatttgaatatattatctgttgtaaattataattttatatttgaccacagagtatttgaagtgggtcttttctttccccaaaattctattttaataactaaaaaatattcttaggagaagtattatttaagaacaggtttatattaaataacatcatttcactttcaactttctggtggtcaaaaaatatgctaatactaattaggatatgatacacatgttctgttagaacagttttggcagttagaagacttctcttcttgtgtttgaaagggatgttacttggggtagttatgagccatgtatccagatgtcctgaaaggaccagtggtagatgtatttctatttttgtcttttcttttttctttctggcattctagttgctgagtgactgacttttgttttcagctcttctcacaatcaccattgttctaataactttgcttaaatagaatgtctccttttgctataagccatggggccatttaccgttaattttttaaagtactgaaatgagaacctcataaattaaagaacactcctgattctgagttagcagatcctactaagccttttgcagatggaaatttcctttaaattggtttgttttcctttaacattccattatcctattgttcattctttggagctgtgatttgtttaatatatttcaggcttcttaataaatcaagtcatgtaagttattatttggatcatttcgaaactacaacagcttatcaaacctctgaaagaagaattttgtgtttgcccacagactgaagaactgattcagttttattggctgagctaccttcattattcatatttaattcctggtactgagggtgggaggagggagaggagcagaaaagatacaactattgggtactgggcctaatatctgggtgatgaaataatatgtacaacaagcccccgtgacatgtgtttacctatttaacgaaccctcacatgtatccccaagcctaaaagtttaaaaatatatatttggtaaatcaattgatgtgttttaaaaaatatcgccttttggccgggtgtggtggcccatgtctgtaaccccagcactttgggaggccaagccgggcggatcacgaggtcaggagttcaagaccagcctggccaacatggtgaaaccctgtctctactaaaaatacaaaaaatagctgggcgtggtggcgcgcacctgtaatcccagctactcgggaggctgaggcaggggaatctcttcaacccaggaggcggaggttgcagtgagccaagattgtgccattggactccagcctgggcgacagagcgagactctgtctcaaaaaaaaaaaaaaaaaaaaaaaatcatctttaaagagataactaacccttccccagaaggcagggccaaagtctaaggttcttccaggtcctttgtattccctataaattttagagtcagcctgtcaatttctatacacacacaaaaaaagcctgctgggattatgattggtattgcattgaaattaaatcaatttgggtataagagacttcaatttggggattgagtctatattgagtcttccaatccaggaacactgtatatctctccatttagtcagatatttagtttatttcaacaatattttcagatctttagttcctttcagcaatattttctcatttttcctgtaaagctcttgcacatcttttgtcccatatctattgtgtatatgtgttttgctagttattaaattatattaatataaattttattttccaattgtttgtcgcatatatagaatgttttaaaaatattgtgtcctgtgaccatgctaaattaactaattctagtcattatgtcttcattatctttctcttgaattttcattgtcttccccttctgggactccattcatatgtaaggccatttgatactgtctctcaggtccatgaagttctgttaatttttcttcattcttctttttctctgtgttcttcaactgaatgaatgccattaataatttggtatgtaatggctcacttaaacttccttttgtttttaagatatttctactctcagctgtgtctggaatcctttagtccggagccccaccaaccctcagcctagaaggaaggaggagaaggatagggtgaaaggaaggggagagcttctagcttcaggacagagatcagaacaaacaacagagcagtcatcttggataaggaaacttccctcaaacctattacttatatcctcagaaataagaaaaataatgcatttatcaaattaaaggattttgaaaaagggaacattcagagaataaaactaaactcttgaaagttaaaaggatgataacataaatgaaaagctcagttgaaggattgaaagataaaagtaagaaaatatcccagaaataagagcaaaaagacagcaatgtaaaataggggagaagataagagaattagagaaccagcttaggagttctagaaagagaaaatgtagacaacaaaaggtaagaaatcatcaaagactggagtaggggaggtcatgctatctgtttctttttctattttttattttgagttacatttttttttactgtgaaacaagcatatgtacatgagaatgaacaaaacaaatatgcagtcatgtattgcttaacaacagagataggttctgagaaatgcatcattaggcgatgtcatcattgtgcagacatcatagagtgaacttacacaaatctgaatggtatgtcctacagtacacctggaccatatggtatagctgttgcttccaggccacaaacttacagcatgttactgtactgaacactgcaggcacctctaatacatcggtaagtatttatgtatctaaacatagaaaaggtacaataaaaatacaatataaaagaggaaaaaaatagtacacctgtataggtgcttactgtgaatagggcttccaggattggaagttgctgtgagtcattgagtagtgagtgaatgtgaaggcctaggacatttattatatgaagtctactgtagtgtaaactctgtagacttaggctacactaaatttatagaaaaattttcttcaataataaattaaccttagcctactgtaacttttttactttgtaaacttttaatttttttaacattttgactcctttttagtaacacttagcttaaaacacacacattgtacagctgtaaagaaaattttatgtccttcttctgtaagcttttttccatttttaagatgtttttatttttaaaactgttactaaaaactaatacacaaacacacacattaacctaggcctatacaaagtcagtgtcatcagtgttcaaccttcacatgttatcccactggaaggccttcaggggcaataacaaacacagagctgtcgttttctgtgataacagtgcctttttctgatatacctactgaaagacctggctgagagtgtttgacagttaacaaaaaaaaaaaaggacaagaagtacactctaaaataatgaaaaaagtataatacagtaaatacataaaccaccaacatagtcatttattatcattatcgagtattatgtactgtacacagttgtatttgctgtacttttctataactggtagcacggtaggtttgtttataccagcatcaccacaaacataagcatggtgttgtattacaatgcacagctgcagctaagtgataggactttttcagctccattataattttatgggaccatcactataaatgctgtccatcattgactgaaatttatgtcgtgcatgaccatacatacaatttaatgaaaaataataataataaagctagcagtgtgtaattaccaaccagggcaagaaatagaatattgccaataccttggaggcctccagtatgaccatataagtttacaaatcctattttgttcctcctccccagaggtaaccactgccctgacaaatgtgatcgttgttttcttgtttttcttactacctatataaacatccttaaacaatataactcagtttgtatattttgaattccatgttaatagaatatcatatgtatatgaattttatgtgaatagaatattatatatgtcattttgcatcttgcttttttcattcaacattgtaggattcattcatgttgtagtgtacagctgtcgtttattcattgctgtatagaattatatcctcagagataagatatatggatgtttataaatcattccactattatgaacatttgactagtttgtagtttttatttaaccaaaaaaatgctgctgccaacattcttacacattttactgtatatgcacattaatttatttacaagtataaatttctttttgaatacatatctattgatggagttgctacatcataggacattcttgtctttgactttactggataataccaaactgtcttccaaaatgattacatccttaaactcaggacacatcttattgtcaaatgtttaatttttgtcagtctgatgggtatgtaagttattttattgtcgttttaatttgcatttccctgattactaattaagctgagtaacttttcatatgtttattggccatttggagttcctgtattgtaaagtataagtttttttgtccatttttctagttttctgtccttttagttgaaatccaaatttgcctaaatctgttattctctgagcacaagtaacttgggatgctttcctttagatttagcctaattctttatcattttgtcagcttgatggtgcttttaaggagatatatatgtgtgtgtgcgcacacatgtgcgtgtgtgtatatatatatatgtatatgtatgtatgtattttttgagacagggtctcactctgtcacccaggctggagtgcagcggcacagtcttggctcactgcagcctccacctcctgggttcaagcttttccctgtctcagcaacccgagtagctaggattacaggtatgccaccatacccgctaatttttgtatttaatagaaacagggtttcgccatgttgacaggctggacttgaactcctcacttgaactcctcacgtcaagtgatctgcctgctttagcctcccaaagtgctgggattacaggcatgagctaccgcgcctggcctggatattttttaaaaatattttttatctagcactttggtttttggcaggcaggttggcactcatagtctgacctaccatttctataaaaagaaacctgtaaatgttcttaaacagactttgaaccagtcttcctgattttgaacccctacctttacccccagtttttgagcctttcagaattttttttcataataattaggttgcttcttagctttccccactggtgacttaacagatcttaggaagccaacaatccttgtccatctgctttctgtcttgtgaactgttgctggtattgtctcttctctttattcttagaggtgtatgcttttaaaaacatatactgggtttgagagggagctgaaataaaagcatgtgttaaatataccatctttaaccagaactacatttgactggtcattttattttcaagctcacatacacttcaaacagagatatggctaaaggaattatcatgtgaacaacagccagggctctgaacatcacagattatatcatcatacttgaaatatttgaaattttgattcaaaatgagagctttatagctatgtcctcaatggactaagtgtttaagtacttaacatccaaaacattcttactaatcaagagaagacaaacaccccaacagagaaataggcaaattttatcaatagccagttcaccagatttgttttctgttagaagcgaatatggggaaatacatgtgtccatgttttgcctacttttcctggagcaggtaaggagaggcagtttaaggatccatgtgataaaccctaaagttgtccatcggctttccagtcccttctaggaatttaacttagggaaataatcagacatttgcaaaggtgtgtacagtggtatttataatagtgaaaaaccaaagaatgaccaataacgggagaatggaagttacagccaaatactttacaactactaaagaatcatgtaaaatatctattgacataggagttttatcaaaatgtgaagtatacagatgaatagtaccacacataaaaagcaaggtgcaaattagccatttatattgttatccccaaaataaatagatgcagtttttttaaaagatgcaggctatatatggaagtgtttgctggttttctgtcaaaagaatggcgactttattttctaatttaaactttttgctgttttctaaattgtctaaatagttatagtttttataatgtaaaagtatcttccaatttagcttcatttgacaaattaccttttcattctatctagctatgtaattctaaatgaatttacagcagtaatcttagagcagatgaatttacaacaataatcttagagtagactacggattagatgtaaaaacatgagttgggctttatggttacagagagttttcctcagtgtggggatcatagctgtattgagtttattcagttttcctttcccacatgaatgaaaaatggggccagcctacaactggaagggcctcggcatgtaccactgtactgtgtatgatgtgatttcttgatgctagtagggagagaatcaaattgcctcctattcaaaccaagacccacaaatagcgtcaaccagtcatttcagctactccctgcagtgtcaagaaggtgtgaacccctcatgttctctattgcatacccttgtctaattcagtgtttcttcttcttttcaggttttggctttatgctacatttcagaaatcataataaccttttctggtattattttattctttttcgcactgtgagaaaaattaaactttcaagtggatgcttcttataaactatttatacccttttgctcccttttgggaggcagggacagggacagagttcctcctcaggctaactaagaaaacttactgcttccaatgtaatttaaaagatctccctctttctattgctctctgtactcttaattcttttttttttttttcacagcagagacaagtgaacatttatttttatgcctttcttcctatgtgtatttcaagtctttatcaaaacaaggccccaggactctccagattcaattatgtccttgggcttggtcgactgctgtaggagtctcagggagccttctacaaatgctagagtgactcatttaccaacattaaaccctaggatacatgcaacaaagcaggactccttcctccatggaatgtgccgatttcagatgacacagcacccaatgtagaaaacgctggaatttttccttggaactagactgtgatgagaggtgcttgacatgaacataagctactgtcttttctttttttttgagacagagtttcgcttgttgcccaggctggagtgcaatggcgtgatctcagctcactgcaacttccacctcccaggttcaagcgattctcctgcctcagcctcctgagtagctgggattacaggcacgtgccaccatgcccggctaatttttgtatttttagtagagatggcatttctccatgttggtcaggctggtctcgaactcccaacctcaggtgatctgcctgcctcagcctcccaaagtgttgggattacaggcatgagccaccacgaccggccagctactgtcttttctttgacccttcctttccagtttttgaagataaagcaggaaataatcttctctgaagatacttgataaaaattcccaaaacaacaaaacgcatgcttccacttcactgataaaaaatttaccgcagtttgtcacctaagagtatgacaacagcaataaaaagtaatttcaaaaagttaagatttcttcagcaaaatagatgattcacatcttcaagtcctttttgaaatcagttattaatattattctttccccatttccatctgaatgactgcagcaatagttttttgtttgtttgtttgtttgtttgtttgttttttgagatggagtctcgctctgtcgcccagctggagtgcactggcgcaatcttggctcactgcagtctctgcctcctgggttcaagcgattttcctgccttagcctctcgagtagctgggactacaggcacgtgccaccacacccagctcatttttgtatttttagtagagacagggtttcaccatgttggccaggatggtctcaatctcctgacctcatggtctgcccgccttggcctcccaaagtgctgggattacaggcgtgagccaccgcgcccggccagcaatacagtttttagttactcgacatctttaagcctataactcttaggctatgcatagccccatgtcctaatcaggcattcactgatcccagcaggtctccatctatttgtaccagcctcctctttcctcccaatctcaaggttactcttaaatactagtaaatgcaaaaagaacttgtaaagtggcaaggcatggcctatcaaaagtcagcccaagggcagttttcagccctgcctcacctgggtctagttcagctgacggatgagctgattgatgcgttcaccccgatagccaggtgtgcccatctccttgaggaagcccactctatttttggtagcatgatgggccactgagaggtggaaagggcgcaagaaccatgagatctcctggaaatgcttccctgggaaggcaatttcatgaatgaggtcttccaagcaaatgaagccaaacttccccaggtgctcctcaatcactgtgttgtctgtcagagggatggtcttattcttgaccttggcttgtccacgtttcaaaatgagttctcggacagacttcagatttggaaatccccaggtcacataaggttccactatatgcagcatttttagattctagggggtaacttttacaaagataccactaaaaattttctttaggcgaagtcttgcagtggttctctgcacccgtaaactcacgccatcaatcctttcgatgcgtacaacaaaggccaaggaatgtttatctggcaattccaaggcatgaggtttcacttctagtcgtctgagacgcaccttgtcacgtttctgccgccaggaatcatgtaggaatgattccagtcgcttaaacctgagcccttttcctttcttctgtcttgctactgccatctttctagtggtgcagctactcaattctttttttaattataatttttattttaagttccagggtacatgtgcaggatgtgcaggttacataggtaaacatgtggccatggtggtttgctgtacctatcaactcatcaggtattaagcccggcatgcgttagctatttttcctaatgctgtcccgcccccccacccaacgggccccagttacactcttaatccttatagctcagatgttatgatccacagtgtggttcttacagaaagttatggattaaaaaaaaaaaaaaacactcaaagtgcccgaactttcttaaaataatcctggtacagctaaactcatgcactgactgtccacctaatatttaacagtctgtgttgtgatatattgttttaatgttctgaatgcttgtcagctttcagtattgaagatgtgaatcatttatcagcaatgacacatttagtctaaggttgtcagctatttatgctacaaattaatgacttgtccttaaaatatcaattttgtgattcatgttttggcaggtggttagatgttttgtgttctaattttaaactatggataaaggttttgtcataatcattgttttattggttccttttctcccctgcccactccccaaaaaaccctgcaattcttttttgttaaacttttattttaggttcagaggtacatgtgcaggtttgttatataggcaaattttgtgccacaggggtttgctgtacagattatttcatcacccaggaaataaacacagtacttgatggataggtttttagtcttcattctcttcccaccctcaagtaggccccagtgtctgtccttcccttctttgtgtccctgtgtactcaatgtttagttcctagttataactgagaagaacatgtggtatttggttttctattcctgtgttagtttgcttaggataatggctgccagctccatccatgttgccgcaaaggacatgatttcattctttttatcgctgtgtagaattccatggtgtatatgtaccacattttctttatgcagtcttctgttgatgggcttttaggttgattctatgtctttgctattgtgagtagtactgcagtgaacatacacatgcatgcgtctttatggtagaatcatttatattcctctgggtatatacccagtgatgggattgctgggtcgaatggtagttctgttttaagttctttgagaaatcatcaaactgctttccacaatggctggattaatttacacttccaccaggagtgtataagcatttccctttctctgcaacctcaccaggatctattattttctgactttttaataatagctgttctgactggtgtgagatggtatcccagcaccatttattgaatagggagtcctttccccattacttgtttttgttgactttgttgaagattggatggttttaagtgtgtggtcttatttctgggctctattctgttgcattggtctatgtgtctgttttgtaccaataccatgctgttttggttactttagccttgtagtagtttgaagtcgggtaatacggtgcctccagctttgttcttttggcttaggattgctttggctatttgtgcccttttttgattctatatgaattttaaaatagtttttttctaattctgtgatgaatgtcattggtattttgagagcaatagcactgaacccgctaattgctttgggcagtatggcgattttaacaatatcgattctttctatcccctgcaattctttgttgttgtatttaactatttttacttgtgaagttttttcagggatgattttgttgaaagtgacaactctaaaaattatgttggtaattaaaattttaagtaatgacttttattttcagagattccacttctcttagactttggagctgttaacagcagtgtccaatctgcagtggtactcagcagtttctgtttcctgcatgcagaactgcttatatgaaaacacagttttaaaaatgctttcttatggctgacattcacattcttattccttttgattcttttcaagagggatttggtttgttaaaattaatttttgcaatacttttatgaagatacaaactctgacaaagcttttaaaacaagtttgagagaatacagtattgatttcacttgtaaatctgacgattattttagaaaaaaggaaaatattatttactattattttgcttataaatgtttatcaattttaaagcttccacattgcacatctcccactacaacagtagctaccatttattctttctcaaaaaaagtgctaagtgtgcccttgaaatttttacattgtgcagaatatccctaaaattttaaaacaaaaattacatcatcacttgctttaaatgtttcttctttatttaacatacagtttctaaaatgttagcaaatagcattttagaagagacacgttacttttctaatgaatgttctaaaatgaaccacagtaacctatacttacttagactgtgaaaaacaaaacttatattctattgttaaattttcaaaagtgaaactacacgatagtttacttggcacatcactctgttattgtgaattgacaaatgtatatgtagacaaatatgtgaaaatcagagtacatatacattatatgcagcaccacaatacattttttagtatgttttgactgatatttaattatataatttaccaagaggatctcaccagaatgtagaaaagtattgaattttagaacaattcacatatttaaaaaaaatgtagtcagcccttttatctgtatctggagaatgcagggtaaaggaataatacatgagtattggtatttaaaaaaaggtgttaatttcttacctatgatacctgttactttgggtatcatttaacctttatttctgtgaaatagaggagttctaacatcctctaattattataatattgttctaatttaatctatcttaatctgtgatacagtttgaaaaccaagcttttactattggcatgtgcaaaaaaataaagcagcagtagacttggaatcttgaatgcaaatttagattttgcctcttaataaatgtataatatagtgttctgggaccaattctctaacatttctgagtcctagtttctgcatctgtcaaatgggattagagatacctactttcaggatgtgatatggtttggctctgtgtccccacccaaatcttatcttgaattgtaatccccatatattgagggagggacctggtgtgaggtgtttggatcatggaagtgatttcctccatgctgttctcgtgatagtgtgggagatcgcaaaacatctgatggtttaaatatggcagtttcccctgtgctttctctctctcctgccaccatgtaagactttccttgcttcctctttgccttctgccatgattgtatgtttcttgaggcctccccagctatgcagaactatgagtaaattaaacctcccttataaattacccagtctcagatattctttatagtagtgtaaaaactgactaatacagagaattggtactggcagggttgggtactgctataaagataatctgaaaatgcggaagtgactttggaactgggtaacaggcagtggttagaacagtttggagggctcagaagaaaactggaagatataggaaagtttggaacgtcctagagacttgttttgaatacttttgaccaaaatgctgatagtgacgtggacaatgaagtccaggctgaaatggtcccagagatgaggaacttattgggaactggagcaaaggttatttttgctatgctttagcaaaaagactggcagcattttacccctgccctagagaactgatgaactttgagatgatttagggtatttggcagaagaaaatttctaagcagcaaagcatcctagtggtgacttggctgattctgaaagcgttcagtcatgtgcattcacgaagatatggtctgaaattggaacttaggtttagaagtgaagcagaacataaaggtttggaaaatttgcagcctgaccatgtagtagaaaagaaaaccccattttctggggaggaattcaagccagctgcagaaatctgaataagtaacaaggagtaataagtaataataagtaaaaagtaataagtaataagtaacaaggagccaaatgttaataaccaagacaatggagaaaatgtctccagggcatggcagagatcttcggggcagcccctcccatcacaggcctgagaactaggagggaaaaatggtttcctgctcagggccttgctgctctgtacagcctcacgacatggtgccctgcatccctgatgctccagctccagctgtggctgtaaggggccaagttacagctcgcaccattgcttcagagggtgcaagccccaagctttggcagctttcacgtggtgttgggcctgcaggtgcgcagaagacaagagttgaggtttgggaacctgtgcctatatttaagaggatgtatagaaacgcctggatgtccaggcagaagtctgccatggaggcagagccttcatggagaacctctgctagggcaatgcggaagggaaatatggggttggatccctcatacagagtccccactggggcactacctagtggagctgtgagaagagggcctctgtcctccaggccccagaaaggtagattcaccgacagtttgcagtatacgtctggaaaagccacagaatgccagcctgtgaaagccacaggggtaccctgctgagccacaggggcggagctgcccaagggtatgaaagcccaccccttacttcagtgtgccctgaatgtgagacatggagtcaaaggagattttggagcttttagatttaagggctgcccagctgggtttcagatttcatggggcctgtggcccttggtttgaccagtttctcccatttggaacaggaacatttacccaatgcctgttccctcattgtatcttggaagtaactaacttgcttttgattttataggctcatacgtggaagggacttgccatgtctcagatgagactttggtcttggacttttgagttaatgctgtaataagactttgggggactgttgtgaaggcataattggttttaaaatgtaaaaagacatgggatttgagagggagcaagtgcaaaataatatggtttggctctgtgtccccacccaaatctaatcttgaattgtaacccgcatgttttgggggagggacctggtgggaggcagttggatcatgggggggttttttccatgctgttcttgtgatagggagttctcaggagagttgatggtttaaatgtggcagtttcccttgtgctctttctctctcctgctgccaggtgagacgtgtcttgcttcccctgccccttccaccatgatcataagtttcctgaggcctccccagccatgcagaactgtgagtcaattaaacctcctttccgtataaattacccagtctcagatagtatctttatagcagtgtcagaatggactaatacaggatagtaatgaagattacagaatatgtagatgaagaagtgctaagtaaatagcagctattattatgtagtcaaattgaatgtatacattgtggtacttcagtgtcctttaaattgaataactagaaatttgttggctttctcaatctgctcacatcagatgacatgttaatttatgcctatacttttttctagttaatagatataaatctattcactcaacttctattgacagaactggtagtgtggcaagacatctcatttctagttaaggctgtataatattaagttcattttacttaaattaactatggtttgggaaatgcttttcatgtcatcatgtatgcccaatttgatactttagtgggacagtatatttcagaaaaaaacaaatgcttccccaaaaattccagggttgaatacattagtcagacatataacaatgtacttcagagttcctctaagggcaaaaatcgtggtatgaatatacaaaacactcctatttatacttttgtatttttgaaatgtagtcttcatgttaatttagcatttcaatgaccagcatgacattatcttaataatttggaatgccaatatgttcatttaagacttaatatagtaagtatctaaagaaaaaaatggaagtgactgaatgcttttgtatctcttaattataatttgtgctccattgtgatatgaaggatagaaggggcaggatagatagaaaacagaaattaactttgatgtttaaccttaccttaagactgtctgttaagtgacccacataatcttaaaaaactctgtcaagcttaatggatgctactctgcaggcccctgccaggcaacagtcacaaggttatgaggtgcatagattttggaattaggcagagctgaattcagatccaggtgttgccttataatgcgactttgggcaaataaaaggcccaatttttgtattcttatctgtaaaatggactcagtaaaaattatttgagataatttatttgtgtactgtacctaggcatgcagcttgacacacagaattacaagtcagtagtttccagtatgattattattgtgaaagagatattttgtttcacctactgaaaacttttttcagtcttaaattttttatctaactggctgtattgcagatgtctgctatataacttttatataattttaaaaactatttctttcctccttgatcttctaggggtaaggttaccaatgttttcattatttactaaatatagcagcccccaccccttattcatggaggataggttccaaaacccctagtgtatgcttgaaaccacagaccacagataatcccaaatcctatatgtatattgtttttcctatacatacatacctatggttaatgtttaacctactaattaggaagagtaaaagagtaatagtaactaataataaaataaaacaattgtaacaatattccagcatcactattcttgtgctttagggccaccattaagtaaaataagggttacttgaacacaagcactgtgatactgtggcagtccaactggtaacagagatagtgatgcggtttggctgtgtcctcaccagaatctcaacgtgaattgtatctcccagaattcctatgtgttgtgggagggacccagggggagctaattgaatcacagggtctggtctttcccttgctattctcgtgatagttaataagtctcacatgatctgatgggtttatcaggggtttccccttttgcctcttcctcatttttcttttgccaccaccatgtaagaagtaccttttgcctcccgccatgattctgaggcctccccagccctgtggaactctaagtccaattaaacctctttttgttcccagttttgggtgtgtctttatcacaagcatgaaaatggactaatacagtaaattggtaccagtagagtgggtgttgctgaaaagatacccaaaaatgtggaagcgactttggaactttggaggactcagaagaagacgggaaaatgtgggaaagttaggaacctcctagagacatgttgaatggctttgaccaacatgctgatagtgatatgaacaataagatccaggctgaggtggtctcagatggatattaggaactttttgggaactggagcaaaggttactatgttatgttttagcaaaaagactggcagcattttgcctctgccctagagatttgtggaactttgaacttgagagagatgatttagggtatctggtggaagaaatttctaagcagcaaagcactcaaaaggtgacttcggtgctgttaaaagcattctgttttaaaagggaaacagcataaaacttcagaaaatttgcagcctgacaatgcagttgaaaagagaaacccattttttgagaagaaattaaagctggctgcagatatttgcataagtagcaaggagcctaatgttaatccccaagaccatggggaaaatgtctccatggccatgtcagagaccttcacagcagcccttcccatcacaggcccagagacccaggaggaaaaagtggtttcgtgggccaggcccacggtcctcatgctatgtgtaggctagggactttgtgccctgtgtcccagctgctccagctgtggctgaaaggagccaatatagagctcaggctgtgacttcagagggtggaggccccaagccttggcagcttccacatggtgctgagcctgtgggtacacagaagtcaagaattgaggtttgggaacctctgcctagattttagaagacgtatggaaacacctagatgcccaggcagaagtattactgcagggcagggctgtcatggagaacctttgctagggcagtgcagaagggaaatgtgggattggagccctcacacagaatccctactggggcactgcccagtggagctgtgggaagagagccgtcatcctccagaccccagaatggtagatccaccaacaacttgcaccatgtacctggaaaagccacagacactcaatgccagcctgtgaaagcagccgggaggtaggctgcaaagtcacaggggcggagctgcccaagaccatgggaatccatcttttgcatcagcatgacctggatatgagacctggagtcaaaggagatcattttggggctttaaaatttgactaactcactggatttcagacttgcatgggccccgtaacccctttgttttggccaatttctcccatttggaacagctgtatttaacctgtgacacccccctaccccctgccccccatccctccggcccttgtatctggaagtaactagcttgcttttgattttataggctcataggcagaagagacttactagccttgtctcagatgagactttggactgtggacttctgggttaatactgaaataagctaagactttgggggactattgggaaggcatgattggttttgaaatgtgaggacatgagatttggaggggccaggggtggaatgatatggtttggctgtgtccccaccctaatctcaacttgaattgtatgtcccagaattcccatgtgttgtgggagggacccgggggtgggggtgcagtaattgaatcatgggggctggtctttcctgtgctattctcatgatagtgaataagactgacgagatctcatgggtttatcaggggtttccaaaacttttgcctcttcctcatttttctcttgccaccaccatgtaagaagtacctttcacctcctgccatgattctgaggcttccccagccatgtggaactgtaagtccaattaaacctctttttcttcccagttttaggtatatctttatcagcagtgtgaaaacaactaatacagatggctagtaagggactaaccggcagggagcgtctccagtgtggatatgctggacaaagggatgattcacgttccagggcataagatttcattactcagaattgcacagaatttaaaacttattaattatttctggaattttccacttaatgttttcaaactgtggttgactgcaggtacctgaaactgtcaaaagtgaaaccacagataagtggggagtcctgtacctaagattattcctttaaattgtttcagtggatatgtagggacctgagtgtgaagtgagagcagcagcatcaaaacctgagggaaatccagatagcaaaagaaacttgtctagtatactggcatgacagagaaaccaaaaagttctcaagttaatgtgagaatctaagaattaaagaattaagcctttgcctttgagggaaggaaaggggtaatgtggctttaaatcaggttgagattggttctgagggttccttttccttcctttatattgatatgaatatagacacaactgttctgcatttccatttgtttttataaatgtctttttaggatttaggaactgctaattatgcaatatgagatatctgttagtttgaggaacatttgaaaatttggtcaaatgacacagatcgtcacacagttttaagacaaatgtttttacctatttgacctagtctggcaatccctatttgggcaaaaatcttcatttgcaggtcatgattggaggcaggcacagaaaaaaaattgccaccttttttgcattatgtcatcaagacatcaaacttcagcctacaaagtagaaagtgttatttctcaagttgaaggcctggatatacctcagcttctcagttctgacactttatcatagtggaaaatgaagaagattgcttaagaacactgatgttggtgtcagaaagacctgggtttgaaccctgactttactagttacttagatcactttaggcaactcaacttttctaaatcttgtttcttcatctgtaaatgctgaaaatagtacccacctcttaggtctgtggagaggattaaatgagataatctatacaaagaaagagcttgcataatagtgccaagtaatggtgaggttatacctgtattctgattataatctcataaatatttaccatgttagctgtctcagagttcttttgcaaaacagataaagatagaaagtataaataagaaaaataagtgaacatatactgaactttgtacaagatgctggcgatatggagagacccaagacatgggccctacctaaaagagattattgatagaaacaggatacatatacatcaaaaggtaacataggatcatctgtgcaaagtgctatatggcagtgttttaggaagtctagaagctgtcatggatcaggaataccatggtggacacttcaggcagggaaaacagatcttagcaaaagctactcctatcataggtacttgataaatatttgtagaatccaggatccctgtagtgataaagaaactacatggattatgtaggggagtgataagacatatgactggaaaaataaaaagaccaaattatggaccatactgagcttgtactataaacagtggaggagcccttcagatttttaatcatgttgagaaaagagttttagcagtgtgtgggggatagaatggaaagagaagccagtgccagaaggactacttagtatcaaccattgcagtggttaaagcaagaggtgagagaaggcatgcattagaatggcagcggtcagagtggatgggaaggaataggtcctgacatagtgttacagggagtaataaataggatgtggaagatgggttagaattggcaaaatctctgcatgtaagtctgggttactaaatatagtgagagaaattcaaatctctctttaagaatcgaataaaatatttagaaataagttactgttgtatttgaggtgaacacaaatggcatttcaaagatgctcgagataccttgttggaaaaagtcaataactgcactattgtctccaacatgttcttgccttctctgaagacatcatgttcctaattctgaattatgaaccatctattatccttgtatgctcttatgtgtgaggaaccataaggtgggaacaaaatccggtcttcattctagaaataactatgcgatcaaaaagtttttagtctttcttcttaccatactggttcttggtattctgtttaccattcaatgtactattattgcttctgcttaaaactcgcatcccctaatgcaagcctgagcaaacagaactgataacacacagcctgagaagggagtgcttggggtctcaagacttattctgtttttctccatctttgacacttggtttgaagagcaaagaaggatacagctgttaggaagtaagttacccaaacacagtgaccaaactggattaattcttccaatgagaaagaaatacattatttctgtgagacagattagactttaagtagcatagataacatgattatattctctctacaaataaatacacaggacctaagaaaccctttacagatccaagtgttttcctctccacttttccatccccaaacccatcttgcaagatatggccagcttatttggagttaattaaatcaagaccttcgttttacagacagggaaaccaagcccagagacactgagtagtaggccactggtgtcttagaggtctgaaaaatcctttactgaacattctcttgatctattaatgtataggttttgttgctgtaaccctctccccaagaggagtgaatataaatgatgcagagtttggatgaactatcttaataagaacctaaagttgaaaccaatgcaaacctctctcaataaatgcaaagcaaagagaataatcagtctttctttggcttgttaaataagataaaatgtgttctgctaaaaccatttaacagaaatattgtgaaaggtttcccctaaagcatttttctatttgatttgaaaactattccatagcttattatcaaacaaatcagtaattctttagctaatgcagagataaatgggcagtcagaaaatataatcacctggtgtgtgcagctgagtatttacatttttcctaatgaacaaagataagaaaagtgcaggtgactttaatgtgtaaaaactaccttttagtgctagcgctagagggaaaaagaaattactggctcaagccaatcctgtacttgataactaagccgtatagtccatggcttggcttcagttctgttttgaatctctttttggacttgtcttgaatggactgtttagggctgcttcagtagtgcagttgttgcatttttaagcatagtttaggttttaaaatgtttctggtccctttttttttttcttttccactttatgttgcttaaagctttatggccaggttttctcatcctcagcattattgacatttgaagctggatacttctttgtggtgggggctgtcctgtgccttgtaggctggttagcagcatccctcgcctcttctcacttagatgccaatagcatttccccaaccgtgataaccaaaagtgttttcagacactgccaaatgtctcctagagagcaaaattgctctctgttgagaactactgtgttacggtgtttggacaaaaactgacaagccaatgggaatattctattggtagttgtaaaaaattaatccagttatagcagctgtatttctggaatttttttccatattaacacttgctttctgaggtgataatatctttgttttttttctcccaaatagatttcttgcattacactgaaaaattgctgattaattcacttaaattgaagactaagccaatcatgtcatttgggtaatagtttaccaactctgcccctttctctgtcagggaagcctctaatttagtaagcgatactgtatccttttgtcaggtacattaccattcctattagcaatagggcaattgagattgagaaagattaaaaggtcaccaagctattacattgtagaattaggttatgaattgtagcctatctggtttagaatctttaccttactagtctccataacaacaattcttccagtgtggtccatggggccctgggagtctccccttaaagggcagactattttcacagtaacacgtactttatttgccatttcattatgtcagcatttgcaataatggtacaaaagcaaagatgagtaaaactgttggcatcttagtatacagtagttactgtattcactgtcatgcacttaaaatctttgaagaagcaaaaaaattattaattacattaaatttcaacccttaaatacatgtggtctttctcatgtcagtgtgacaaaatgagaaggtgcataatccacttatatcgcatatagcatttgatagttgtctcaaagaaaagtgtataagattaaactgtgagttaacctactttttttcatggagtaccatgagagataaactctggttttcagccttgggtatttggcgatgttttcccaaaaatgactgaagtaaacttagcactttaaggaaaacaacttaaagtatttgttgccaattgataaaatataggtttcaagcaaaaatcagaatttttgaagacttgtatctgccactgtgagcttgacaaatgtgactcttttatattacataatgaactatgtcaacatttgaaagatctgcataactcagtgaaccagtattttccagatgactaatgcatgataatacaaaatcatgcatgggtaaaagatacattcaaagtgcaagatagactgacatatttcaatgtaacaatcaaaagttcattgataacagttttggattccacattgcaatactaaaacctttaaaaaacgaaattgtccaattttggtgtagtaatcagaaaaggcaatctataattacctgaacttaagtttctggaggaccattaaccttctacaggctcatggggaagactgtagcacttctctttccctaagatcctccagaaaggaagaaggtaatccttgggggtagggtagagacctattgtgtgatgatcaccaagtatgtaacaatgctttatataactctaatatatataatccacacaaaccccctaaaatggcactaataagggaatggactcaaagaagttaagtcagctagccactgtcacagctattagagcactggaactaggatttgaacccagatttgtctgtatgtaaagctgattctcttcgtaatagtactgagacacaagaggcggctacaaaatattctggtactccatcctagaccagagtttcaaggttcgttatcatttgtagcatgatactggatcctcacagtgcttgcctttcattcaggtgccaggaaacgtctgcctgaatgaatgggtgtaatttacctgcacattttacatgcttctctaggtgtgtgattaactcataatccatccatgactttcacccataatcctccttgtagcaattgctttgcttgcaacaaaactaagtagacatatctagctttatgcatggttttctctctctgaactctaacataaactcagcctcaggaattattcggtttctactacatttgccattctgattgggaaccaccagcattcaggtattcacctggaacaaggcattttgttccaagggttcctcacttaaaagcaagcaccctagcaatagttcataatggaacttcttaacattctcagaatgtttggcacagctgtgagtgaacacacattgagcaatcaataactattacagataatgatgcccttaagaccaggatattttagctttcccattcaaagggggtgaaatatgcactcttactatggtatacttttggttccttctgccatgtatccttaataaaagatgtcaattccatatggttttctcttgagttctaaccattttgttgtaccctagcccttttaacaatatcaaacttgcaactgaataccatttagcattcatccattttttccaatggtgttcattataggctatcttactcctcctatttgtatgacaaaaattggcttttttcaccgatgtctatggtacatctggcagctttccatgtactcagttcttatctgatgtagcccagaacgactgcctgaagggatgccaaaagcctgattgaggttccaaattttcagctactgtactatcaatccatttgttcatttttactttcccttgtcatctgtagcttacagttgagtggcctgaacatgttttgcatacattgtaatatctaagaatttgggaatacggtcctaggatttagacttaatactaccttccatttatataatacttactcataaaatcttcagtgttcctgaaaaagaaaaaggaacatgtattgagtgcctgctagaagcaggaacttgtagtagattttctatgtgttaccttattttcacaacacacacacaggtgatatccttcccagtttactgatgaggaaactcaggggtcaaagtagtagatacctacccaaggtaacagaagctgtgaagtggtacagctgggatctaaaatatgtcagcttcaccgtagataggctccctgatgaaccacctgccacggcccgtatgaccgcatccaggggtgatgatgtcattttcacagggttattgagagctaaaactacgaagtactacaaactattatttaaaatataaatacatactatatatgcatatgtgtgtatatataattaatggggtaaacattacagaatactgtcctaacctttaaacaatgcactcgttttctgtaaactaatatacaaacaactgtttggtccctaaaaatagatgtcaggtgacagagactggctgagcaagaataggagtatcttcagaatagaagccagaggagtttttgcttccccaacacattgtcgcaccattcactgttccaggaccttcctacttctctggaaaactctggcccaaagcagctcctctacattagtcacaagtttccattaatcaggggtggcctgtgccggacctacagcagagtcatttcaggttattctgttacaggctttcgacgtgtagtcagtccactcgcccaaatctagcagggaatgaatgccttgtaatacggaagcatctacaaattcttcttaacagtgttcagagaacaatgtgaaaccctggggccttttcccagaattagggtggtgggaatgctgtcctattgactaagcctgttaggtaagcaggcagttggcaagattcaggaagcttcatttgaagatagaatttagggcgatcgtttggatttactggcttaattacttaaggtaacatttataaaagaaattgtcattccattattattaccttttaacttttattcctaaacggaacattagcaacaaactacattacttgataaatgtaatttctaaccagattgataactagaaaaaaattttaagttactttgctctgtgaattagtttaaacatatttgtaattgagacttactactgttattggctgaaataaataaaagcaagagataataaagaataacagagacaacgaacacccaatttaagtttatttctaagttccatcttttttagagaaaaggcaaattaagaaaagtttagagagaggtactagtatatttatgaacttgtatagatgataagcaaaacggactttaatatgtagaattccagaatcaacaggttgccagcatccatgtttttgaagatttgcttaagaacacaaccaaaaatggaatgggcagtctctaattacaagcagaaggctacaaaatcattttagctgcataatacagttttggttctaaagtcagcacgtaagaggaaaattccttaggaaaatacaacattgaaaaccattgtgtcatgtaatatgaaatgcaataattaatttttcctccagtaatagaaagatcactgtttcattggtttataaaaatatatctttatcattaaatgtggcaaaatgttaagacttggtgaatattggtgaaaagtatatatccattgtacaattctttccaattttttttgagattgaaaatttttaaaacaacaaattatcttttaaacagctaataatcactagacctgcactctttgtggtgagactatgaaaaatgttagagacctagtaagagaagcagattcacatttctgtcttcttcttcaagccaaacagtcatagagtggagtgggcagaatggaactcacttttgaaagcctagtgctttgtccaatcttactgcaagccagacaggaaggttatagaaaatgtttctggatcagtcttctctgagtcatatgaaattgtggtttcagccaagatgacattaggaattagagacatgggacaaaaactttaagattgtaaaaaaattttgactctagtaggaaacatgggtagaattgtaatgacacttgattgaattttaaaagatgcctgtataagatcttaaaattaggaaaaaaattatggcctaagcaattaaaggcataggaggcatctttttgggatgatggaaatatcctctctcctgattgtgatagtagttacatgaatattcatttaacaaaaaccataaattatagacttagaaaacagtaaatgttactgtatgtgacaccttaataaacgtgattataaaaataaatcctaagcatctaaaaaaaaaaaaaaaaagaagaagaagtgaaccagaaccacaccattctattttggagacacttcaaaagaaatgacctcattcttaattttgtttaaagaagaatataacatgatttgaatatatttagctaggatattttagtgcctgctagcacttgaagccagagttcactgtgagcattctgactatgaagtgagaagctaagagaactgtattttgatattcctttgacagttaaatcataacactgttcttccccttctttagccccagcatgagaccagatgtaagctctcctccatccagctcctcaacagcaacaacaggaccacctcccaaactctgcctggtgtgctctgatgaagcttcaggatgtcattatggagtcttaacttgtggaagctgtaaagttttcttcaaaagagcagtggaaggtagtgtgtgttttgaagagtttatttttcctctacttggttttcatttctcagggtggattttgaaatttccattatatgcaaagcccatgaaaggctaaatatcagttaagaggggagaggagggtggctcctaggtcctctaatgggcaggaaagtatttaaaacaacaatacaaaaagatctagaataaaatagaaaagtacaagttgatgtctgggagtttggtcagggagcataaggtaacactataagaaagtgctatcatatgaaatgatggtgttaagtttgggcataacataatgttcattgtattagaaacatgggctttaacttccataagctaataggtttcaaagtcaccaactttactggcctggcaaaaatgagtcacagtgagaactgtgacaggaaaaaaaaaagatattcatttcatttcttattcattttttttttctattaagccagggcactgtgctaagtggtataaataccaataagacctgatccttaccctctgggaagtcacactccactgaagtgaaagatgagttaacaatgacaaggtacagagattataatatagatgagggagagagaaactcggcctgaggaggtcaggaaaggtattttagagaaactgatttcactatataaatgttgtattaacacaaatcttactttgttatggattcagactgctgacagggcaacagcattatctccctaaagaatgagaaattcattccatagcaaatttattagaagagagtctaaaatgtcctaatactaccagtgactcctctaggaaaaaaattgtcatataatttagttatttctaaagcagtttgaaagtagcttggcctaaagctctgattatattaattttttaaagaaacaattattcattcactgtatgaggattattattatttgtctcatgttgtgtttgcatatccatgagagttagatgagtcattttcttttgttttactttttaatacattagcaaattataaaattactcatattacaccacaaagattacaaggatggcagctttggccagtgtagtagtcccacctattgattagagtcaaaagtaaagcccagccctgctttgtgcattgctcctaataaagtggatgttacttaacacatacgcagaagacagaagcgtcttcgtgtcctcactttactcctcactttcttaactgcttaagtatttccacgatataaatgcagtgataataataatacggacagtccctgacttaacgatttttcaacttttatgatggtgggaaagtgatacgcattcagtatggctcctcgacttacaatggggttgcctccagataaacccattgtgaattgaaaatatcttacacttagcactccattcttaatacctgctagaattatagattatccctcaaaattggcatagtataatatgggtatcagcaagttgttgcactttattcagagctttacactaggcaggggtgggctttacttttgactctaatcaataggtgggactactacactagccaaagctggcatccttgtggtctctgtggagtaacgtgagtagcattataatttacatcccccataacaaatgatccaagagagtatgtgatcaatgcagcagaactattgtcttttattatctgatttcacatgtaacatgccatcacttctgccatattttattggccacacagaccaatcttggtaaaggacggaaagggactgcacaagaccatgcattcaaggaggcagagatcactgggggccatcttgggaggctggctaccacacccaccataaatagaaaaccagaattatttgccaaaaatagactttaaccacaaaaatgaataccatataaacaaaacaaagtcacaaaatttcagctgacttgaagactcatctttctattagttagaaagggaatttaccaagtagtagaagacacaggaactccaaaataagatatctcattgtcttatcagaagggttgacaggaaaatgggctgggcactgtggctcaaggaaaatgggctgtgcactgtggctcacacctattatcccagcaatttgggaggccaagatgggaggattgcttgaggcctggagtttgagaccagcctgagcaacataacgagaccccgtctctacaggaaaaaaaaaaaaaaaaaaaacgttatccaggcatcgcacctgtagtctcagctactcaggaagctaaagcaggagattcaggctgcaaagagctatgacacaccactgtactccagcctaggcaacgtagcaagaacttgtctaaaaataaataaataaatgagtcaaggaatgaatgaatggattgacaggaaatgactattagttgtacgtggccatgtgttatgaaatagtgaatactagttaaaactcctcattttatagataaggaacagatagatagacttgtccaacttcatgctaataaccacaaagggctatttttaacttatgaaggtacattgcctctgatcctatagctcagagtcttagctgtgcacaagacatacctgggataaagaaatcaagattggcgtaatgtgcacatcctgacatttcagttggatataaacaaaactttggaatttttcatttttagcagtgggtgattttttttctttttttcttccagtaactgtaggacagtgatttagagattccttatagggtataacttttttgtattataaccacttcatcaatagatgtatctgttgatcgtacttttgatttataggggatagaattgggttagtgcttccattttctgtccaagtaaagaagctaggatatttatagagtacaaaaagaaattgaaacagctggtacagatatttggcattggagagcagctctgaacaaaggtgaattatagtctagtggtcaattttgtggcctattctttacaaagaattgaacctgatacagttaaccatctaccccaaactattatttgtttaaaacacaatctattggctgggcgtggtggctcatgcctgtaatcccagcacatcgggaggccgaggcgggtggatcacgaggtcctgagatcgagacaatcctagccaacatggtgaaaccctgtctctactaaaaatataaaaattagccaggcgtggtggcgtgcacctgtaatcccagctactcgggagtctgagccaggagaattgcttgaacctgggaggcagaggttgcagtgaggtcatgccactacactactacactcccagcctgggcgacagagcgagactccatctcaaaaaaataaaaataaaaaaacataatctatcaaactgtgtaaaacacagtttatcaaaaaagtagttacccttggtgggtactggctggaattgggcagaaagggggcctgttggggtactgttctgtttcttgatctgagagctgattacataaaggttcttggtttgtaaaaatttattaaatggttcactgatttgtgtactttttttatatgtgaatactgcaataaggttttttattgcactgttttcagtttgttgaacagaaaaagggagactctttttgttgtttttgacctctcgacctcataatggcaatgtaggcaagaacattccctcaaggcaatacctgtgggtgtcttggttatattccaccggaaacaaagacagaggctgtccttataaaatatgtttgaagacctgtgaaactttaatagtgccttttattccatataggacagcacaattacctatgtgctggaaggaatgattgcatcatcgataaaattcgaagaaaaaactgcccagcatgccgctatcgaaaatgtcttcaggctggaatgaacctggaaggtaatataaatatctgaaagcaattgtttgtctctgtagcttataaaaatttatcattttacttttgaagatacacgtaagcagatgtaattaatgtagtcagttcagtatatatatgcttgactagcataatgttactgcccaataaaaatgggaaatttttttcatgaatatgtcatattgtttgtttatccaccagttcttcttacacacactgaattcagtacagccagactatatacaaagaaaggaaattatgtaataatgaaacttacacaacatgcagcaactttattattcttactccttttttcagcctcaaaactattccctagggttggaaatgtttctgtatcagacatatttacatgtccatttttctgtttgccttttaaaagcataccttttacttggagatctgtgttttattacagatcttcaagcggggggtggtgggaaaaaaaaaacctcaaggaagaactggatgggttttgttttggttttcaagtaaagaagaaacctgggccgggtgcagtggctcacgcctgtaatccccgaagtttgtgagaatccttctgtctagtttttatgtgaagatattaccttttccaccgtaggcctcaaagcgctccaaatatccacttgcagattctataaaatgagtgtttgaaaaactgctcaatcaaaagaaacgttcaactccatgacctgaatgcacacaacagtgagaagtttctgagaaagtttcttggtctccccgcactttgggagaccaaggcaggcggatcacgaggtcaagagatcaagatcatcctggctaacatggtgaaaccctgtctctgctaaaaacacaaaaattagcggagcgtggtggtgtcacctgtagtcccagctactcaggaggctgaggcaggagaatcacttgaacccgggaggcagaggttgcagtgagccgagatcacaccactgtactccagcttggcgacagagcaagactccgtcttggaaaaaaaaaaaaaaaaagaaacctgaaactagttataagttagagtttcatatccctgtttatataacaagttgtataattaacactgatctcagcattaaaaaattttcctctgaaaaaagtttggaattctgctgtggttgaaattgcaagttctgtgaaggtagtggtgatctcataacacatatgcttagtatttattgtgaaattagcacttttattcaacaaatatgcaccaacaaggcagtcactaggtataaaatgaataaaatagtgcctgtattcaagtagtttatctgctagttaggttgcagagtcagtcacaaaatagcatggcacaccatagagggcatagggccacaggaacaagaggaaggtcacctaattctgtcttggaagtcaaggaagaagtaacattgaattttaaatctataagctgagtaggaattagatagatgaaaaataagggcagagacatgatcagatttgtattttacaaagactaatcttacatggagagaccaattaagtgaatatggcagtcctccagataagagatggcagtactgagagagaatggaaaccatgtggttccttttatgattatgatgattattattattttagagacagagtctaactcttgtcacccaggctggagtgcagtgacatgaacatggctcactgcagccttgaactcctagactcaagccatcttcccacccagtagggctacggatgtacactaccatgcccagctgatttttttttaatttttgttttaattttttgtagagacaaaggggtcttgctatgttcccaggctggtgtctaactcctggccttaagtgatcctcccaacgtggcctcccaaagtgctggtattacaggtgtgagccactgcaactgacctatgtggttcttttgataggagagactaattgttggtgctatctagcacacactgtgtgtagacatcttgttaaatagaaaatagatttatgggtatgactatgaagagtctaattccccaaaccacacacacaactctatctacgtttgaccaggctatttaaacttaactgcagagtgtcagcatgttaaacattgatttacataaaatgatagctgcccactttcttgtaaatgttataaaaactgtagagattaactaaaaaatgcacacagaagtttgctttcagttccacaagggtagtttatttttgttataaaaacagtattccccactttcttagataccagatctctgcccagattttacccagtttcatcttgctgctctctaatctcctatgtatgtaatatactttgaccatttaaatatgtattaagacacttgagtttttagtgccctttggtttattttctccggtcccaattatctctaatcttcattttttcattttacctattttatatttcgaaataggttttgaatgaagctcaaaggacaaacccaaataaaattctgtcgtatctctaatatattgtggttgcttacccagtaacatttttaggtgcttttctgaatacatataaagtttaagatctttggagttttaagtatataatgtttttctgggcaatttctccctatccaaactatgagggccttctttcatcaaaagaaaaaagatatatcaactacaaagtaatgattttgatggactaggctacgaaatctgtccattttttcctccttcttacagtttaatagcaattgcagtgccctttgcccttactgtactagaagacgaccccaggcagtgactgacatctgatttttctattaattataccatcactgccatttccagttgaatcttttgttggacatcagaaatttttcttacatgaataaaatttaagcatacggttgggcgcggtggctcatgcctgtaatcccagcactttgggaggcctaggcaggtggatcacgaggtcaggagatcgagactatcctggctaacacggtgaaaccccgtctctactaaaaatacaaaaaattagccaggcgtggtggcgggcgcctgtagtcccagctactcgggaggctgaggcaggagaatggcatcagcccaggagttggagcttgcagtgagccaagatcgcgccactgcactccagcctgggcgacagagcgagactccgtctcaaaaaaaaaaaaaaaaaaaaaaaaaaaaaaaaaaaaaaaatttaagcatacaatttaggctgcagtttctcaaaatattgtattaaaaataaccaattatatgcttttatagtcagtataacgtatccagttagtgtagaaattggcatttgttgaaaactactacatgttagtctttgatatacattcttctactttttggaccctgattattaaaaacacctttgaatagggccatgatttactttatatccatttttatactacatagtggaagaaaattctgatttgttatttcctactatgatatgtaccgtgtggcacatatcatataaatgatccaattctacttgtagatgaattgaaagaaaggcttaaaaaagttcttagggtttgtgtgtgtggtttcactgtaaaactatcatttttgtattgaactaacctcagtatacataaaatctttatttggcctggtatgtacgtatgccaggaatctttggcagaccctaacacttacaatacagatgagccatgtgtttcacactttttttttaacaaccttcagaaatattctcttgttcatcagagtgcttcccctaagccaagcagtttcgatgatagccccagaataactttgcccaagtctctccataaatgtaacttaggactccaagtggtgtatttttatactcttgccccataccaagtaaatctcaagatttattttaagggagtggccttcactgcttaaagggcctagcatttaagaacagataagatttttaatggtgatcctaaatgtttttttttaaaaaacttgcttgtttttctcttgaaactaaatgtttttattcacttcattttaagatatattgtaatcaatccaaagtatggctttatttttagtataaacagtcaaatgaagcttagtcttgtggcattgtcagatttataaccaaatattactgaaactaatttttttaagttcaaaaacccaatctagtagtttctctcttattttcaacttttattttagattctaggggtacatgtacaggtttgttactaagatacattgtgtgatgccggtgtttggagtatgattgaacctttcatctaggaagtaagcacagtacctaacaggtgctttttaacctgtgcctcccttcctctatcccccctcttgtatttcccagtgtctgttcccatctttatgtctatgtgtactcaatgtttagctcccatttataaatgagaacatggtatttgtttttctgcattagttcatgtaggatactggccgcctgctacatccatgttgctgcaaaggacgtgatttcattctttttgtggccacatagtattccatggcatataaataccacattttctttatccagtccactgttgatgggcacctgggttggttccatgtctttgctattgcaaaccatgctgcagtgaacatatgggtacatgtgtctttttgatagaatgatttatttttctttgggtatattcccagcaataggattgctaggttgaatggtagttaaactcttaattctttgaagaatctccaaacttctttccacagtggtgtcattgtggttttgacttgcatttctctgatgattaacaatcagcatttttccatatgtttgttggccacacgtatgtctttttttgagaagtgtctgttcatgtcctttgcccatttttaatggggttgtttttgcttgttaatttaagttccatataaactctggatattagggctttgtcagatgcatagtttgcaaatattttctcccattctgtagattgtgatagtttctcttgatttgcagaaactctttagttaggtcccattgtcaatttttgtttttgttgcagtttcttttggggattagtcataaattctttcccaaggccaatgtcgagaaggttatttcctaggttttcttctaggattttcatagtttgaggtcttacatttacatctttaatccaccttactaatttttatatggcagtaggtaggggtccagtttcattcttctgcacatggatagccagttatcccagcaccattaatggaatagggagtcttttccctatggcttatttttatcaactttgtgtagattacatggctgtaggtgtgtgtctttatttctggactctattctgtaccattgtgtgtggtttttttttaccagtaccatgctgtttcggttactatagcctgtagtatagtttgatttggggtaatgtgatgttgccaactttgttctttttgcttaggattgctttggctatttggggcattttttggttccataggaattttagaatgctttttgctaattctgtgaaaaatgacattgtagtttgataggaatagtgttgaatctataaattgctttgggtagtatgaccattttaactatactgattctaccagtccatgagcatggaatgttattccatttgtttgtgtcatctttgatttctttcagcagtgttttgtagttctccttgtaaaaattttaaactaacttagatgcattcctaggtattttactctttttgtgactgttacaaatgggattgcattcttgatttggctctcagcttgaacattactggtgtatagaaatgctactgatttttgtacattgattttaaatcctgaacctttaccaaagttgtttatcagctccaggagccttttgacagagtcttcagggttttctaggtatagaatcataagtgaaaagagatcgtttgattatttattttcctatttggaagccttttatctctttctcttacctgattgttctgactaggatttccagtactatgttaaattggaatggtgacattgggcatccttgtcttattgcattaaggggaatgcttccagcttttgcccatttggtatgatgttggctgttggtttgtcatacagggctctttattactttgaggtatgttccttcaatacctagtttggtgaaggtttttatcatgaagagatgctggattttatcgcaactttttctgcatctattgagatgatcattattttttttgttatgtggtgaatcacatttattgatttgcatatgttgaacgagccttgcatcccagaaataaagcctacttgattgtggtgaattaactttttgatgtgcagctggattcagtttgctagtgttttgttgaagatttttgtatctgtgttcatcagggatattggcctgtagttttgttgttgttgttgtttctctaccaggttttggtattagaatgatgtttcccttgtagaataagttagggatgaggccctctttctagattgcttttttagaatagttttagtaggattagtaccagctcttctttgtacatctggtagaatttggctgtgaatccatctggtcaagggctttttttaattggtaggttttttattattgattcaatttcagaactcgttattggtctgttcagaatttcagtttcttcctggttcaatctaggcaggttgtgtgtttccatttccacatacatacttactccaaataatggctttatatatacgggggtcagctgaaaacaaaaatgatactttcatagtaaactccacccgcccccccacccacatacacacacacataaaccctagattttttaaagcctttgttccaatttatccatttcctctagattgtctactttgtgtgcatagaggtgcttgtaatagtgtgaagatctttttcacttctgtggaatctcttgtaatgtcatcttttacattttttattgtgcttatttgggtcttcactctttttttctttgttaatcttgctagtggtctatcaatcttgtttatcctttcaagtaaccaacttttataaactaggttttaagctaattaagatttctctactttcattaagaaggaagtagtgttaccacagactcatgaacacttctgtggagctcctgtattgactgctaatcaactatatgctccaatgggtcaggaatttatataaagttgtattaactaagttgctttaaaatagtgattgcttaactaaatgattcagttcagttaactccttcctgaagatattttgaaaaattaattagtattatttcttgctctagtcagtacagcacagttgggttcaattgtactttctgagctgtattgaaaaacatcagttttctcatttagaactatatataagtagtgagaaattaattacaaactgagtcatagaaaatgtttttttttaatcctccagcttgttactctttcttccttgttctaatgtggagtaaagaaatatgcattccaaaccatttaaagttatgactaattgaggctgtcaaagtactgtttcagtgtattgatttggcacatgtgtgttctcttttacattgtcaacaaaagtacattttatgattttggatcaagatttcactgagatacttctggttgtttaaagagtttctttatgtattggtgtctttcctttttaaaattttatcactcctctattaagttgtgatatccaaatttaaaatattctaaaaacatgttctcctgcaagttgaggtaatgatagttgttatgtggtacttactataatatatgccaggaactgttctaagcattttacatatttaattctcacaacaaccctatgaggtagggactaatattgtcctcattttacagaaggggaaatgaagagtcagggagtaacttgcacagatatccagctacaacatggcagaaccaggacttaaatccaaatatgctgatttcaggtttctgccctttagtcctatatcatactgtgcctccaagagagcatggtaaactaattagcatggttctatcatgattctgtttctattttgaactattaataaaaatttttgcaattctcagttaccccatttagtatagaacacaataagaatggaaccattctattctaacattgtacattgagatatcgttcccaccaccatatctgtcctccatagactatatggtgtgtcattttaaggacagaggatctaaaaatgatttttaaaggtgatttacatttactcttccctttgcaaaatggtttgcatccctaataatttagacaagtacatttcttcgtgatataaattacatttcttgcctttccctggaattctgagtactttccctctgagagaacaatgtaattcttatttatttagtcactaaaataacttcaggagtatgaataagtctactaaaaagtctacaggatccatgttgtagtttgagtagatggttccataccaagtcaaggtaaaagataatttatatataatatgaaaatggctgctttaggtttatagagtaatcaatataaatcttccttataaaagggaaatttcccacttataatttatgtaatgtaaagtttttcatttcatcttcccaaatgtttttagtcccacgcagtatttatgttagtacctatgtaaaggtgaaaagtgaattttttctactggtagaactaatactatttttagcatgtaatctgctgtcatcttcctatctttataagtggctttgaacaagtgtaaatagtgtaattctcttcattatatatactaccatgatttagattaatcttaaaccacagtttgtaatccgttactccaagcttagatttttttttcagtttatagtaagagtaatttgccttatataaccaatgaaattgttgcatttagagtgaaagtgagataaaaaaataatttatagaagaatttacaaaagttatttactcagattgttttaacataccgttataatactttgtataaggaataactctaatgaagtttctggcctatttgtaggcaaaattaattgggaataggttcctctggatcttttgctttcagaaaaaaaaaagttttttctccttttccatgtcactttatcataattgctaaataaaatatttctcccatcttaatagttttagaaagtaaaaatacttcttgaataaactgtgtagcgcagaccttcccattacagttcatttctatgtatttgtttaaatacccacagctcgaaaaacaaagaaaaaaataaaaggaattcagcaggccactacaggagtctcacaagaaacctctgaaaatcctggtaacaaaacaatagttcctgcaacgttaccacaactcacccctaccctggtgtcactgttggaggttattgaacctgaagtgttatatgcaggatatgatagctctgttccagactcaacttggaggatcatgactacgctcaacatgttaggagggcggcaagtgattgcagcagtgaaatgggcaaaggcaataccaggtaagatgcaaaacataaaagagcaactatataaacctttgtgttttcttcagcaaaaacactttggcttttatatcatcgtgagcccatggcttatcttgtttctcttagttctggggactatgaaggggagagtcaggtgaatacaggtgatagggagtttataataaaacatttacattactccctgcttttcaaatcattatgcacaggatggtaatttcacataggatgatgtaatatcagaattcaagttacaagactcactcaaaactccttttacactgaagtttggggaaagaaaatgtttttagttaattccatttgttttccttcattgtgccacttttaaaaatcaggttgtttgtaagattggtaaacatcaagtatgttgattgtcaaaatttgtactaaagtagaatgattttaacccttcactaaatgaaatgctacacattgaatgtaattttaaagataattttaaataaaagttaccctattggaatttggtgtggaatggcagaggtcaatgttagtgtcagctctgactttaaagacagggaattgacaagcctgtgttcacgcaaatagttagggagagagcaagaaagtaacctgacctcctgtcatccttgttttattaagggggaaagaggtgtgaatagcagggcaaatgttttgcttaactcattgattaatacctcaagccaagattcttttctgttttttaaaatcaatacataatagttgtacatatttactgtacatatttatatttagggggtacatgtaataatttaataaaagcatacaacgtgtaaggatcaaatcagagtaactgggatatccatcacctcaaacatttgtttggggaacattccaaatcttctcttttagctattttgaaatataaagtaaattattgttaactatagtcatcctgttgtgctactgaacactaaaacttatttcttctaactgtatttttgcacccgtcaaccattcccgcttcatccccatcaccactatctttcccggtcactggtaaccgccaagccaagaattttggctattttactatttagttcatgtttacttaagcagacagaggtgacaaaactggctttttttttttttttttacattaaaagctattaaaaagcacctagggggctgggtgcgatggctcacgcctgtaatcccagcactttgggaagcccaggtgggtggatcagttgaggtcaggagttcgagaccagcctggccagcatagcaaaaccccatctctactaaaattacaaaaattagccgggcatggtggtatgaatctgtattcctagctacttgggaggctggcactgagaatcacttgaacccgggaggcggaggttgcagtgagccgagatggcaccattgcactccagcctgggtgacagagcaagactttgtctcaattaaaaaaaaaaaaaaaaaaaaaaacacaagagggtttgtgagtcttaaagtgtcagatgacagaagaaaactgtgtctacctagtatttaatttccattttctgttaggggtgcccttgttttgacagggctaattgatctcattgctccttggcaattcccacagagatgatcttctgaagagtgttgcctcatacctttatttctcttaattcaggtttcaggaacttacacctggatgaccaaatgaccctactgcagtactcctggatgtttcttatggcatttgctctggggtggagatcatatagacaatcaagtgcaaacctgctgtgttttgctcctgatctgattattaatgagtaagttgtatgtgtgtcattttccctgtattcatagggtatctttaaccagctgatgttttcctgattgactgctattgtgataattcaggactgaaacaatcctactaggtatctaggatctaggcaaactggaaatagagttatgagtgcttggggcaggacaagtgtaatgtaaagcaaatgtacatgtggcattattactgtcccaggacatgtttgaggatatttaacagcatatctgaggttagtaaagtctgtcgcaagcaacaaggaatcttactgtgatatcatttacataaccctattccagaaagaaaaaggagcatggtaaaactcatgtggattcagtggggacaattgtagatgaggatatctaggctgatggggtgggacatatggacccagacacaagaggtatctctttgcatggcaaggctcacccagtgtctgtggtttaagaatatgggaacaaatttgttttgtttaactgagagaagaccaagcctttaagattttataaatcagctattctcttatcctctaagcttattcctgtgtctgcgaaatacttcaggtgtccatttccccttacctcattgcagttgtttcctcactcgttttctccctccagtgtaacgttcatcatgttggctaatgtttgcttcctcaagcacagtctgactgcatcacatatctccccagtacacagattgtcttcagtatcttcccactgaccctccagtacatattctgcatgatttcagactttccagaatctgacctcacttcctctcccattgttttccttcacacactcttcattcccatccatcctttccagcatactcttagactcttggtgttcacatcaccagatacacagcagagaagtcacatcctagttactctcactttctaccttgtattactacttttcgtacccctagcttattgctattagtacaatgtaaacagggagttcacacacacatacccctggtctaagaagaataaaaaatgaaggagatttctgtttgtatagaaaacagaagtcaccttgacttttattgccaaaaagaggactgttcaaactactgcatcacaatgtaacaagattaggtagttggatccaattttaaattaactggtaaatatatttagtttctggggaaactgaagacattattactcatcataatcctaccatgctgtttaaaaaataccatgttggcagtatttgttttttagtcactttctaatatgtaatttgaaggcatttaagtggaattaaaagcataaacagatttgtatgaaacaccaacttatcctggtttataaaactaacctaatttagggtttttattattagggcattcagatttagctttaagcagtcacagcaaaatctaatcatgccacatacattccttacataaagtgggatttataattttttttcctcaacagatttacattagtttcattttcattaagggatatgtacttcctattcttgtgttctcatgctgctgcctaaaagatgggcagtcctccacctttttcttttctttttttttttttttttttttgagacgagtcttactctgtcacccaggctcaagtgcagtggtgtgatcttggctcatggcaacctctgcctccagggttcaagtgattctctgcctcagcctcccgaatagctgggattacaggcgcactccaccacacttggctaattttttgtatttttagtagagacggggttttgccatattggccaggctggtcttgaactcctgacctcaagtgatccacccactttggcctcccaaagtgctgggattacaggtgtgagccaccgcacccagccctccacccttttttcttagcccactatgtttccatactgctctggtgtctgtgacaggcagatattgcatatcagaaagtatgcattcaagttctgaccctctatagagctgtcaaacagtctctcatggttgcccttaggtcagaacgttgtgggggaaaaaaaaattgttgttgtttttacagccaacaagaatgagtttttacttattctactacactataactttgttgaaattttcagttatatgagtataaccatgtacaagaaactaaaggaaaaaaaggtgcctcccagaaaaggagtgctttacctactattaaggactagggaggtgcctcttcggtaagagcagattttaaatttgaagagcctctgatcactttggcagcatataagtcatgtctaatttattttatataaaggaataaaccacatattcagtagagaaaaataataacctttctgttgttaagtccaagacgactttctgtcagaaacttaaaaaaaaaaaaaaatcttgaagcattttaaaagctgtgaactgggcccagtttcaggctcttagtgtcatttcacaagtcaggaaactttagagacctatttgaaaatcataggtatgtaatgacttcagaatcataagcaagaattggtttagtacctttagtttaaagaatattaaggcatatgcctgtcagaggcagattttgagcatcagaagtctagaatcaagttctaggtctcgccctctgcataactgtgaacagtgtcacacatttttgtctttaggatggactgctgtgaaaaaatttacctttaaaaatcaagtgtgtaggacctaaaactgtcgtctaattgaccgtattcaaatgataaaccttgatttaaatgagcaactagtaataagttctataagaattctaacactttaattaaataataaaataatacatggcatgcatgatagaaaataatatctccactgttacattagattattcattagtctatttaaacagccaagatgcaggaagtttaaggaaagttctccaaaattctgattttatagggaattagcaataatattattgcagtagttgtttttctttatgagttcatagttttgcaaaacaaaacaaaaatgtgctttttggggggaagtagcagtatttctaactaataccctgctatttatctttcacaggcagagaatgactctaccctgcatgtacgaccaatgtaaacacatgctgtatgtttcctctgagttacacaggcttcaggtatcttatgaagagtatctctgtatgaaaaccttactgcttctctcttcaggttggtagaacaccttttcaccttatgtcaaaagcatgaaatatgaaggcctagaaacaaaggttaatttatatacatagtactaataattataccaagtctactattatttcctactagtcagatgatttttatgaatgtaaaatattagaaaggcacagtaagtgacaccaagattaataagacaaataggtatggcagaaacagagaggtatatgagctgcatagggatctctgttgataagaatctgtgtagacttttttctccttccttcctttgatctttgatcatgggaagacatggaaaaagaaagctaactacagtgattttgtccactacactgttatttggttaaaaattttagtttcctaatgagtattagcatgtatgagaaattatgggagaaaaaggcgcatcctagaaaaggtgtgcttaattactattggggattggttaacatagcatgggagctggattgtcagagattcattatctagaaaatggcaacaagagtttataaaacgaacttctgtgagattactttttagctagcaaagacaaagatgtccttcagtaggtgaagtgataaactatgatacatccagatgatggaatactattgaggactaaaaagaaataagctgtcaagccatgaaaacacatggagggacgttaaatgcatattactaagtgaaaaaagctaatctgaaagggctacatactgtgtgattctaactatataacattccataaaaggcaaaactgtgaagacagcaaaaaaaaatcagcggttgccagggtttagaaggaagggagggataaatgtgcagagcacagaggatttttagggcagtgaaaatacttcgtatgatactacaatggtggaaacatgtcattatacatttatccaaacccaaagaatgtccaccaccaagagtgaaccctcaactatggactttgggtgatgatgtgtgggacaggaggtatatgaaaaatctctgtaccttcctcccaattttgctgtgaacttaaaactgctctaaaaaaagtcttttttaaaaaaagctctatgaactagttggtattataaaccttaggccatttcaagtaaaaattacatatcaatgtttattaaatactgagttaatagctgaatacctctttcatatacaaataagtacatttgcaattttttaaaaagtcttaattccattagtaactgtggtttcatagttgccaaataactgtaagctatggatgttgcacaagactgtgattttatttaatcatttcatatctatttaaacatttccaaagcgcacattcatcttaatgttttcacactatttttgctcaacaaaaagttattttatgttaatggatataagaagtattaataatatttcagtcaaggcaagagaacccgataaagatcattgctagagacgtttaatgttacctgtagcggtacacttgttaaagaagtgattaagcagttacataaaattctgatcatagctttgattgataccatgaaggtataattcagtgcctggatactaacaactttacttgtttaaaaaaaaaaaaaaaagaatggtttcaattgtatacatcccagactaattgagctatatgatttttttcattgtaaataatatcacgagttcttcttgttaaaaaataatagaatcataaggatggaaatatataccttaagatatagacttctactatgatagactactggaataggtatataacctcccaccaaaaatgctagactaaaaaaattaagaactaagtgaaggcaggaacctacagagataagtggaactcaagccaacttgctctttgacggcatttgtagaacctggtaaattagtaagtttagtaagttggggtttttttaagtttataatcttttttaaaatgatttcaataggtttttggggaacaggtagtggtaggttacatgaataagttctttagtggtgatttctgggattttggtgcacccatcacccgagcagtgtacactgtacccaatgtgtagtctttcatccctcatcccctccccaaccctagtccacaaagtccataatatcattctcatgcctttgcatcttcatagtttagctcccacttagaagtgagaacatgcaatatttggtttcccattcctgggttacttcacttacaataatggtttccagttccatccaggttgctgcaaatgccattattttgttcctttttgtggctgagtagtattccatggtatatatataccacattttctttatccactcgttgattgatgggcatttggactggttctgtatatttagtaagtttaaaaacaagggatggaaatataaatgcagttgaaaaggcagtggatggatctaaaagcagaagaatacaattgtttttaatgattgtgtatatgtttgtgtatataaaccacaagggaaatctgtaggtactgaaaatcacaacaggaaaatggcaacaaagctatagaaactggaaaagcaatgacttttcttagatccctcagagaatggaggtcataggacaaaccaccacttcaaaatctagaagaatagacaaatacagagaaacagccaagatcagcttactgggaaaagatgccactgaagccaggaagactatggcaatttgggaaaagatgccactgaagccaggaagactatggcaattttgatgaattgctggaggctgagtgaggactagcttcagagttaaaaactcccagggacccagtcttagtgggggtttcctgcaatttcttgggtttaccccacaaaatttctaacttccagaaactccacaaggttcttatggtgaagatgcaagaaaaattccctcctttttctggtaggagtagagggaaggtaaaatttggaaatacgtagcagagtgttcacaacaaaaggcctgccctgtaaggaaaactaattcaacaggcccttatgtgacctgggggaaaggcaaatagaggattctagcccttccttagccttcttgtctcatttctgaaagtcacagcccagggattcagacccactaaaaaaaactgagatttaatcataaagattaaaaaacaattcccctccccctccccaacaccttaccaccatataaacagggctccaggataaaataacagtggattacaactgagagagctgcaagacacaagctgtttaaggagctcttaggaaacccaaaaacaacagaagaaaaagtaaataaaaacaaggaaactagaggaaactgaagcctccagtacctacaattatggcaaacattaaatacagcccagctcctagccagattagcatgaaacctcacactaaaagtctaattacttcagttttgatatatcaatcatgtccagctttcagcaaaaaaactacaaggcatgctaaaaggcaagaaaaacccacggtctgaagagacaaaacaagcatcagaagcagtcctcagatatgacacaaatatttcaattatcagatagggaatttacaatacctatgattagtaggttaaaggctccaatggaaaaaagtagacaacatgcaagaagtgatgtacgcagagagatggaaactctaaaaataaatgctaaggaatgctgtaaggaaatgcagaatgatgttgatgggctcatcagtagactgagcacagccaagcaaagagtcagtgagcttgaagatagataggtcaaaggaaattcccccaaactcaaatgcaatataaacatagtagacattaatccagctgtatcagtaattactttaaatttgaatgctctaagtacaccaatcagctatttttttaactaggaggtgaaaataaagtttgccaccagatgctcactaaaaaattattagaggatatatcccagccaggcgtggtggctcacaccggtaatcccaacactttgggaggctgaggcaggcagatcacagagtcaagagatcaagaccatcctggcttacgtggtaaaaccccatctctactagaaatacaaaacttagctgggggtggtggtgcgcgcctgtagtcccagctactcaggaggctgaggcaggagaatcacttgaacctgggacgtagaggttgcagagagccaagatagcaccactgcactccagcctagtgacagagggagactccatcttagaaaaaaaataataaaagtaatcccatctttaagaaggactgaagaataacaaaagtggtaaataatatagatacatttaaactgacatttactatgtatataaaataacaacagtaacaatttccttgagggctaaaaagtagaactaaagtaagtttcaaggatgacaactagaaatagggtatgcagggtatgcaaagtaccaaaccattgggggaagagaatacctaagaaaaacaatccaaaagaatgaaagacatgagaggagggagaaaaaaatgcataaacaagggcatgataacaggaagtaacagataaggtacattagtacagctaaattcaaacacatcagtagtttagtttcattaaatatagagatggggccaggtgtagtggctcacacctataatcccagcactttgggaggctgtgggcagatcacttgaggtcaggagttcgagaccagcctgaccaacatggcgaaaccccgactctactaaaactataaaaagccgggtgtggtggtgcatgcctgttatcctagctactcgggaggctgaggcacaagaatcatttgaacctgggagatggaggttgcagtgagccaagatcgtgccactcttctccaaactgggtgacagagggacactgtctcaaaaataaaataaatgtagagatggactgaatgctccaagctaatctgacaggattttagaaataatccaaatttatgctatttaaaaaaagctatatctgaataaagatattgaaaggctgaagtaaaaggatctactttgcatagtataacccaagacatggccaactttttctgtaaagggccagatggtaaatgttgttagctttgcacagtctctgtcacagctactaaactctgcccttgtggcaggaacatagtcattgacggtactcaaatagaacaggcatggctgtgttccaataaaactttatttacaaatacaggctgcaagtaggatttggcccataggccaaagtttgctggcccctatattgaccaaaacaaaaccgaaggagctacattattaccaagcaaaatagatgttaaggcaaaatactccttaaagcatttgttcaggaaaaataattgtaaatatatagtttcaaattacataatacaaaaattcatagaacaagaatacttagataaatctagtaaaaataatgagattttactatacctttcttacaaattaagcagacaaaaaaataaggatatggatgtacatttcatctctcttgggtcaatactgaggtgtgagatcactgggacataggttgagtgtgtgtttaaatttatttttaaaattgccaaacttttccgcaattgttaacatttaccagaaatgtatgagacttcttaagatccattctatatcctcctcagtacttggtactgtcagcctctttcatcgtaggtatactgatgattaaaaatattaagcatcttttcatgggcttattggccacctatatttcttatttggtattgtgcctcttttaatcttttgcccattttttaactgggttttaagaattgttcaaatattctcaatgtggccctttgttaaatatatgttttgcatgttttctttaagtggattacatttacagttttcttaaaaaaatgtagagatgagcaaaagtgtataattttgaagaaagcttcgtgtctttgtttactaagaaagttttgcttaatccagggttaaaaagattttctactatttgttttcttatagaaattctgtagtttcagctcacatgcttaagtatatgatgcaaggtaagggacaaggttcattttcttccccaaaatccatatctggttgctccagaacttgactctcttttccctattgagttacttggcaattttgtagaaaatcagttgtttgtatatgtgtgggtctactttcagactctttttcttacccaacgatctgtatttcttacccaatgatctgtatgcctatattcatattgataacaccctgtcttgattactgttgcattacagtaaatcttgaaatttggtaatatgaattctccaaatctgttgttcttttccaaactgttgttttggatattctagtttccttgcatttccacttccttttttttttttttttttgagatggagtctcactattgttgcccaggctggagtgcagtggcatgatcttggctcatcgcagcctcagcctccccagcagtgggattgcaggcacccaccatcatgcttggctaatttttgtatttttagtagagacggggtttcgccatgttggccaggctggtctcaaaccctgacctcaggtgatccacccacctcggcctcccaaagtgctgggattacaggcatgagccactgtgcctggtcttccacgtattttttaattagcttgacaatctctaccaaaaagtcttttggggctgggtgtggtagttcatgcctgtaattccaccactttgagaggccaaggcaggcagatcgcttaagcccaggagtttgagaccagcctgggcaaaatgtcgaaaccctgtcactacacaaaatagaaaaaattagccaggcatggtagcttgtgcctgtagtcccagctacccaggaggctgaggagggaggtcaaggctgcagtgagccatgatcatgccagtgcactctagcctgggcaacagagtgagactctgtctcaaaaacacagtctgatagaatttttattaggatagccttgaatctatagatccatttgaaaataattaacatcttaaatttccaatttctggccgggcgctatggctcacgcctgtaattccagcacgttgggaggccgaggtgggcagatcatcaagtcaggagttcgagaccagcctgaccaacatggtgaaaccctgtctctactaaaaatacaaaaaaattagccaggcgtggtggcacatgcctgtagtcccagctactcaggaggctgaggcaggagaatcgcttgaatctgggaggcagaggttgcagtaagccgagattgtgccactgtactccagcctgggcaacagagtgaggctccgtctccaaaaaaaaaaaaaaaaattccagttgttgagaaagaataggaattccagctttggaggagtggggagaccatcaaatcctctttccaaaaatactactaaaatactactgagcagagtatagttccacaaatagtcttctgtaaagagactcacagtacatatttgtctttgtaggccatatagtccctgttgcaatttctcaattctacagctataacaggaaagcagctatatacagtatgtgaatgcttgtgttctaatacaaatttatttgcaaaatcaggaaaatggcttgaaatggtttaagatctagttttctgactagatcatggtatataatcttttccatatatattttgaatttggtttgctaatattttgctgatcatttttatatctctctttatgaaggatgctgatctacaactttcttttcttgtgatatctttttctggctttgctaccagggtagtactagcctcttaaaatgagttgagaagtattttctgttttcttaaagagtttatagagtattgatcttatttattctttaaatatttgatacatgttaccagtgaagccatctgggtctgtgttttctttcagggaagatttttaattatttgcttatttgttatatagatctattcagaatttatatttttccttgacatagttttgtaatttgtgtgtttctatgaaatgagccattttgtctgagttgtctaacttgggcataaagttgtttgtaatcctttaagttttgtaggatccatagaggtgtcccctccattatagattttcataatttgtgcctgatcatctttttttcatggtcagtctagttaaaaatttatcaattttgttggtctttacaaagaaccaatttttagtttcattgaaatttttagtttcattgattttctctttttgtttcctatgtcattgattattatttcttcttttctgcttgcttttcatttaatttgttcctctttttctagtttaaggtagaagcttccattgttagttgaagaccttattttcttatatagatgtttaaagctatacattttttgtatattttcattcatttcattttctaatgtccttcatgatttttttcattgacccatgtgtattgcttaatttttatatatttggggattttccatatctcttcctattcatttctaatttaattccactgaggtaggaggtacattgaaggactctaatattgaatgactccaataagtcttctgagacttttttaggcacttgcatatggtctatcctgagtgttccatgagtgcttgaaaaaaaacttactgtgctcttgttaagtagagttttatgaacgtcagttaggtcaagttgattgatagactaattcaagttttctgtatctttgctgattttctgtctagttgttctagatcctacaactttgtctacatccttgccagagcttggtatggtttttttattatcgctatcctagagagtatgtagttgacccttgtgacttgccatgcatttaatgactgcccatgttcatagcagcattattcataatagcaaaaaaaacttttatcatatgcttttgtgcctcaagatcatatatttttcgtttttagtcactaatatggtataatggtataatatactgtttaatttctgagtaattgactagcctttcattccggggataaatcctatttggttatgatatagtatcctttttacatatagctgaattcattgtactaaaattttggtatttttgcatctaaatccatgagggatatattctatagctttggtgttatgataatatggtattatttctttcttaaacgtttggtaaaactcagcagtgaagctgtcttggtttgtttggagccttttttgtagaaaggttttcaagtacaagttcatcaaatgtttactgataatatgtttattcttgagtgagctttgttggtttacatctttgaaggaatttaactgtttccttcaaatgttgaatttattggtataaagttaagttattcataatattcccataatatccttctaatggctccagtatctctagtgttattccctttcattcccgacattggtatttaatatattcttgctttttttttttttttttaatcagtctggctaaaagtttttcagttttaccaatgttttcatagaaccagcttggtcttgattttgttgttgtttatgcatgttcttagttattcgtttctactctttatcctttccatttttcttgtgtttagggtagaagcatatataattaattgagacctttcttttctaatcaaagcttttaatgctgtaaattttctaagcactgtcttcattgcatcccacacattttgatatgctgtgttttcagtactagagatttttaattttatgataccttatttaatcatgatgccttatttaatctatagcttattaaatgtcaaattctaaacatttgggtttttctccagatatgtttgttactgacttctattttaatctcatttttgtcagacagcattcattgtatgacttaatcctcctaaatgtattcagacttgttttatgttctagattaatgttctgtgtatacttgaaaagaatgcaagttcttgggtagactgtttcagaaatgtcagtcaaatttaagtcttgtttattcttattgattctgagacaaaggtgtttataatgttagatttgtctgctatatctctgacattgccaaatatccccttggaggcaaaatctccccctcccttttgagaaccactgatctatgtagccttttttctgggactaatttagccttgcttctgagatgtggcccctaggtctctactgaatgcccggcatatttaattagatctttctttcctctatggcctcaagggatttcaccctaagtatgcacaaatttttattcagccgaagactgtacagatttctggaggcctttctttgtgtacctccttcgtttccagtagtctgacccataaattgtacagatttctggaggcctttctttgtgtacctccttcgtttccagtagtctgacccataaattgtacagatttctggaggcctttctttgtgtacctccttcgtttccagtagtctgacccataaattaaagctgctttagcctccccaaacttcaatctctttctcctcaacccagcaagattgctagaccctgggttccctttcccttcactgcagtatgataattactttcaagcacaaaggtttagaattaagatttcttactcctgggctaggtatggcttaccgtatttgtttctcttttcctagggatcataatcatgtattgcttgttgtccagttttccagtaggaggggaattccaggctgtacttacttcctgcagccaaaagaggaagtaatgttagtgatttcaatattaaaacattaaaaaaaaatttaagatggatgaaattcttttatatgcatattgaattgggcttcaccatagttatttttagaattaggactaaccggcagggaaaaaaactatacggcagggaaaaaaactataagccatcgctgttttacaattttgcaataattagattttctgtagtatagtaatgtgtaaaattaacccattgttaatatagaatgccgttatcactcctgattaagcggtcttcattttcatgttaatactgatgtcttgtaatgctttatggaatcaaacattttcatacatattcattagtctaattctaatcataatccaatgaaaaagagcaggaaagatgctcaaggaggttatattcaagtccacatggcaagtaagaaataagactactcggctgggcatggtgacttactgcctgaaatcccagcactttgggaggccaaggtgagcggaattgcttgaacctgggaggcggaagtggcagtgagctgagatcatgccaatgcactccagcctaggcaacacagcaagactctgtctcgggaaaaaaataataataataagacttctagaagctcctaaatccatagcttttcctctataccagcatcttctaaaaatgtcagcagcagtgaagtttcagtttgggaaataatgcatttcccctctctggagagtgcacagttatatctccaagaagtactgaaattcagaagtctgcctaatatgtattaaacatttagcttttctcaaactttgaccaccaaatcctttgtctcgctctaactatagttaacacagaatcagtgttcccaggagcacactgtgaaaaatgtagcactctacaaaagtcctaatctccacaggattaagtgaaaccatgattaaccctctgttccttgtccttattagtaccattttctgaagagtaatgtatccccccaaaacttttatactagtttcactaaccagaatccatgtacataaggaaggacagatatttgctccctactaagacatatctattagctacattaaaaaaagtattgcatgccgattttaaagttataattaactggtgatatcacagatattccaagatataattgctggaataaacactgttgttgaagccttctatctatctcagtactagaattaaactcaagtgcagaatggcagacaaagttaactaaaaatcactgtattatttcatttggtcctccaaatagctttgtgagctaaggaggagaaggtgtatcatcaccacttccattttatagatgagaaatcaagtgatttactcaaggttaagtcctccaattctttgttatcctgcattttctcttggctgtagtttaattaataatcctaagaaaatgcttatattttagagtgcagtaagagtacataaacaatgttaaatgcccatcttgcatgtataaaaagttatagcaagaaatctggctgggaatggtggctcacacctgtaatcctggcactttgggaggccgaggcaggaggattgcttgagcccaggagtttaagaccagcctgggcaacatagggagatcctgtctctacaaaaaaatttagccagacacagtggcttgtgtcctagctactcaggaggctgaggtgggaggatcacttgagccaaggaggtcaaggctccagtgagctatgattatgccactcagacatggtggcttgtgcctacagtcctagctactcaggaggctgaggtgggaggatcacttgagccaaggaggtcaaggctccagtgagctatgattatgccactgcactccagcctggatgacacagtgagaccctatctatctcaaaaaaaaaaaaaaaagaaaagaaaagaaaaagaaaatcctttaactgacttcatcttaaccttttagttcctaaggacggtctgaagagccaagagctatttgatgaaattagaatgacctacatcaaagagctaggaaaagccattgtcaagagggaaggaaactccagccagaactggcagcggttttatcaactgacaaaactcttggattctatgcatgaagtaagtgtcaaacataaagccaaatataagagttttctgggacaaagtatgttttgattagtgaatataattatataccagcagcgcccccacccccgcccccagtttgtggatgttggtgatagcttgagttcaacttatgaacttcagttttgtagacatttttcctaaggccaattatgaaatatcctttcacctagtcatgtgtatataaaatcaccatgttattacagaatttagtaatactgtttttaaaaagtatgattaatccattaaattagaataatgcacccttcatatattatggtactacagtgattcatgaaataattctatataattctacatacaatcaaagaaatataaaatgtgttttgtacggaagtgcttatttttcatctggggaattccagtgagattggtatattctaggccagataattttttcaaaatagaggacaacaaacatgagatgttcccactgaccaatttggaagcctgatcattaccatatcttctcttgcaggtggttgaaaatctccttaactattgcttccaaacatttttggataagaccatgagtattgaattccccgagatgttagctgaaatcatcaccaatcagataccaaaatattcaaatggaaatatcaaaaaacttctgtttcatcaaaagtgactgccttaataagaatggttgccttaaagaaagtcgaattaatagcttttattgtataaactatcagtttgtcctgtagaggttttgttgttttattttttattgttttcatctgttgttttgttttaaatacgcactacatgtggtttatagagggccaagacttggcaacagaagcagttgagtcgtcatcacttttcagtgatgggagagtagatggtgaaatttattagttaatatatcccagaaattagaaaccttaatatgtggacgtaatctccacagtcaaagaaggatggcacctaaaccaccagtgcccaaagtctgtgtgatgaactttctcttcatactttttttcacagttggctggatgaaattttctagactttctgttggtgtatcccccccctgtatagttaggatagcatttttgatttatgcatggaaacctgaaaaaaagtttacaagtgtatatcagaaaagggaagttgtgccttttatagctattactgtctggttttaacaatttcctttatatttagtgaactacgcttgctcattttttcttacataattttttattcaagttattgtacagctgtttaagatgggcagctagttcgtagctttcccaaataaactctaaacattaatcaatcatctgtgtgaaaatgggttggtgcttctaacctgatggcacttagctatcagaagaccacaaaaattgactcaaatctccagtattcttgtcaaaaaaaaaaaaaaaaaagctcatattttgtatatatctgcttcagtggagaattatataggttgtgcaaattaacagtcctaactggtatagagcacctagtccagtgacctgctgggtaaactgtggatgatggttgcaaaagactaatttaaaaaataactaccaagaggccctgtctgtacctaacgccctatttttgcaatggctatatggcaagaaagctggtaaactatttgtctttcaggaccttttgaagtagtttgtataacttcttaaaagttgtgattccagataaccagctgtaacacagctgagagacttttaatcagacaaagtaattcctctcactaaactttacccaaaaactaaatctctaatatggcaaaaatggctagacacccattttcacattcccatctgtcaccaattggttaatctttcctgatggtacaggaaagctcagctactgatttttgtgatttagaactgtatgtcagacatccatgtttgtaaaactacacatccctaatgtgtgccatagagtttaacacaagtcctgtgaatttcttcactgttgaaaattattttaaacaaaatagaagctgtagtagccctttctgtgtgcaccttaccaactttctgtaaactcaaaacttaacatatttactaagccacaagaaatttgatttctattcaaggtggccaaattatttgtgtaatagaaaactgaaaatctaatattaaaaatatggaacttctaatatatttttatatttagttatagtttcagatatatatcatattggtattcactaatctgggaagggaagggctactgcagctttacatgcaatttattaaaatgattgtaaaatagcttgtatagtgtaaaataagaatgatttttagatgagattgttttatcatgacatgttatatattttttgtaggggtcaaagaaatgctgatggataacctatatgatttatagtttgtacatgcattcatacaggcagcgatggtctcagaaaccaaacagtttgctctaggggaagagggagatggagactggtcctgtgtgcagtgaaggttgctgaggctctgacccagtgagattacagaggaagttatcctctgcctcccattctgaccacccttctcattccaacagtgagtctgtcagcgcaggtttagtttactcaatctccccttgcactaaagtatgtaaagtatgtaaacaggagacaggaaggtggtgcttacatccttaaaggcaccatctaatagcgggttactttcacatacagccctcccccagcagttgaatgacaacagaagcttcagaagtttggcaatagtttgcatagaggtaccagcaatatgtaaatagtgcagaatctcataggttgccaataatacactaattcctttctatcctacaacaagagtttatttccaaataaaatgaggacatgtttttgttttctttgaatgctttttgaatgttatttgttattttcagtattttggagaaattatttaataaaaaaacaatcatttgctttttgaatgctctctaaaagggaatgtaatattttaagatggtgtgtaacccggctggataaatttttggtgcctaagaaaactgcttgaatattcttatcaatgacagtgttaagtttcaaaaagagcttctaaaacgtagattatcattcctttatagaatgttatgtggttaaaaccagaaagcacatctcacacattaatctgattttcatcccaacaatcttggcgctcaaaaaatagaactcaatgagaaaaagaagattatgtgcacttcgttgtcaataataagtcaactgatgctcatcgacaactataggaggcttttcattaaatgggaaaagaagctgtgcccttttaggatacgtgggggaaaagaaagtcatcttaattatgtttaattgtggatttaagtgctatatggtggtgctgtttgaaagcagatttatttcctatgtatgtgttatctggccatcccaacccaaactgttgaagtttgtagtaacttcagtgagagttggttactcacaacaaatcctgaaaagtatttttagtgtttgtaggtattctgtgggatactatacaagcagaactgaggcacttaggacataacacttttggggtatatatatccaaatgcctaaaactatgggaggaaaccttggccaccccaaaaggaaaactaacatgatttgtgtctatgaagtgctggataattagcatgggatgagctctgggcatgccatgaaggaaagccacgctcccttcagaattcagaggcagggagcaattccagtttcacctaagtctcataattttagttcccttttaaaaaccctgaaaactacatcaccatggaatgaaaaatattgttatacaatacattgatctgtcaaacttccagaaccatggtagccttcagtgagatttccatcttggctggtcactccctgactgtagctgtaggtgaatgtgtttttgtgtgtgtgtgtctggttttagtgtcagaagggaaataaaagtgtaaggaggacactttaaaccctttgggtggagtttcgtaatttcccagactattttcaagcaacctggtccacccaggattagtgaccaggttttcaggaaaggatttgcttctctctagaaaatgtctgaaaggattttattttctgatgaaaggctgtatgaaaataccctcctcaaataacttgcttaactacatatagattcaagtgtgtcaatattctattttgtatattaaatgctatataatggggacaaatctatattatactgtgtatggcattattaagaagctttttcattattttttatcacagtaattttaaaatgtgtaaaaattaaaaccagtgactcctgtttaaaaataaaagttgtagttttttattcatgctgaataataatctgtagttaaaaaaaaagtgtctttttacctacgcagtgaaatgtcagactgtaaaaccttgtgtggaaatgtttaacttttattttttcatttaaatttgctgttctggtattaccaaaccacacatttgtaccgaattggcagtaaatgttagccatttacagcaatgccaaatatggagaaacatcataataaaaaaatctgctttttcattatgtgactccaacatgcttttgtagaacttgtacagttccgattgtccaatctgatttttgtttactgaaagtagagttacccctgcttcaggaaccttaagataatatggtgggcatttaaatgtcagtgtggcaatgttcgcctgctaatatggcatagattcaaaataagcttaaccctggtgccaaagacctgaagattatcccatccatgcctcaaatggttgtgtgccaattactgcaaagggtactaagggaaggagaaattcactcctgaggctgcttcaaatgtatgtctttatcacaaaagatgacattttatgtaagctaatgttatctagtcaaaattcttagcttattttaaaatcaactcttcaagaaaaggaataaacatttaatataaatatcatagcagtattgcacatagaatagaaaggtcgggcagggtagtggaagtcagctattctatacaatccattcggtattttccaaaacatttgatgttcaggccatatccaggaactggatgacctaacaaacttctctgagtacctttttttccacaagagatctccatcactaagaaaaaaagcattgtgatttaaaagccaaatttgccttatccatcatcatgtgcaccaagtatttgctacctgcctactatataatattgaagatacaatgtgaataagaaaaatactattgctaccctcaatcagagtatgtgattggaaaagtgtataacaaacctttcccagtgtcttcaggtataatgcagagataccagatacggcatcaatgtgtatacacattatggctgtaccattcactttaagtagtaaccttacatttctgtagaacaccttcacatacatttttaacaagcctcactgaatgaattaatgacatgaaaataatgaggcagattattctcgtttccattttataaggaagtaaactctgtaagaaagtaaacaggctcagaatttaagcactgattcatagcccctagctcccatgttattgaaatttgaatggaaagcctctaatgaggccattcatctatcagatgtcaaagagcatgtctctggcctatgagcctctcagggaactggttatgtttttctgttttaaattaaactaatgctttactgagcacttactatgtgccacgcacaatgataattcaatatattatttcatttaatcatagtacccctctaaagtactactgtaaagcagtgctattatcctcattgcatttatatcaggaaactgtggcttaaagaattgagtaacttgcctacagtcacaaagctagctccagaatccatagttttaaaaaccactattgagaaattactaatatgagctaactagggcgaatgaacccatattgatcattatgtgtctggccttttgacatgtcctcatttaatctaatcccttttgctaccgtatcaattttgacttagaaatttaacaatgatacattagtccccgcttatctacggaggatatgttccaagactcccaatggatgcctgaaacatagatagtactgaactgcatgttttttcctatattacatacctatgataaagttaatttacaaattagatgcagcaagagattaacaataactcaattacaacaatatactgtaataaaagttatgtgaatgtgagctctcaaaaaatcgtactatactgagggtaactgagaccacggaaagtgaaaccgcagataaggcgggcactattgtatttccttctcttaaaaacgtgtcctgtaccctggggtggttgatggtggaaaatactagttgcccacagattacagaatgccctttggtttgtctaatatacaacagggagcctgtctcactaatgcccacagaaaaatcaaacatttcttcaagtgatatggagcatatagggtacagtcaaaccaaggaagaaagttgtttataaatgagaactatagtgcaagttaaaatttgctcctagttttgcaggtaaagagccagactttgggtgtagaaaaaaagttgaaaatactgaggcttttacataaggtgattttttttttttttttttttttttagaatttcaactaatctcttttaacttaagtcgttcttaacagtattggtaacttcatagcactttctttctggtgaaataaccccatcctccctcttatttaggcttcctgtttcctagttaaaatggggcagtactttgttagggaagtatttttacttcacttggttacaaacatgtaagtctcagaacaaaagagtttgtgcagaccatatcagacactcaaaagactttcttcactctacccacttgagtaagagacaatttatattctgttcaccttatgtaccctcaccaaaaatattcaatagggtaataatgtgtata

SEQ ID NO: 11 - DNA, 20001 bp, Homo sapiens
  source 1..20001: mol_type = genomic DNA
nnnnnnnnnnnnnnnnnnnnnnnnnnnnnnnnnnnnnnnnnnnnnnnnnnnnnnnnnnnnnnnnnnnnnnnnnnnnnnnnnnnnnnnnnnnnnnnnnnnnnnnnnnnnnnnnnnnnnnnnnnnnnnnnnnnnnnnnnnnnnnnnnnnnnnnnnnnnnnnnnnnnnnnnnnnnnnnnnnnnnnnnnnnnnnnnnnnnnnnnnnnnnnnnnnnnnnnnnnnnnnnnnnnnnnnnnnnnnnnnnnnnnnnnnnnnnnnnnnnnnnnnnnnnnnnnnnnnnnnnnnnnnnnnnnnnnnnnnnnnnnnnnnnnnnnnnnnnnnnnnnnnnnnnnnnnnnnnnnnnnnnnnnnnnnnnnnnnnnnnnnnnnnnnnnnnnnnnnnnnnnnnnnnnnnnnnnnnnnnnnnnnnnnnnnnnnnnnnnnnnnnnnnnnnnnnnnnnnnnnnnnnnnnnnnnnnnnnnnnnnnnnnnnnnnnnnnnnnnnnnnnnnnnnnnnnnnnnnnnnnnnnnnnnnnnnnnnnnnnnnnnnnnnnnnnnnnnnnnnnnnnnnnnnnnnnnnnnnnnnnnnnnnnnnnnnnnnnnnnnnnnnnnnnnnnnnnnnnnnnnnnnnnnnnnnnnnnnnnnnnnnnnnnnnnnnnnnnnnnnnnnnnnnnnnnnnnnnnnnnnnnnnnnnnnnnnnnnnnnnnnnnnnnnnnnnnnnnnnnnnnnnnnnnnnnnnnnnnnnnnnnnnnnnnnnnnnnnnnnnnnnnnnnnnnnnnnnnnnnnnnnnnnnnnnnnnnnnnnnnnnnnnnnnnnnnnnnnnnnnnnnnnnnnnnnnnnnnnnnnnnnnnnnnnnnnnnnnnnnnnnnnnnnnnnnnnnnnnnnnnnnnnnnnnnnnnnnnnnnnnnnnnnnnnnnnnnnnnnnnnnnnnnnnnnnnnnnnnnnnnnnnnnnnnnnnnnnnnnnnnnnnnnnnnnnnnnnnnnnnnnnnnnnnnnnnnnnnnnnnnnnnnnnnnnnnntacttggccctcctaattgggtgttctcagtgaaaacgaggacactgctaatatgctttagaaaatagccctcacattctccctgttcccaatcccccacttactctaagctccccaggtagcaataattcagaagtcaaattgctcagcactcctatggttcaagtgattcttgtgtctcagcctcccaagtagctgggactacaggagcccaccaccacgcccagttaatttttgtattttttagtagagatggggtttcaccatgttgaccaggctggtctcgaactcctgacctcaagtgatccactggcctcggcctccaaaagtgttgggattacaggcgtgagccactgcgcccagcctcaaccttctagtgaaccctccatgctctgttatcttttattcctcttggatttttgttgtttcttttctttttcttcttctttttcttttctttttttttttttgagatggagtttcattcttgttgcccaggctggagtgcaatggcacaaccttggctcactgcaaccttcgcctcctgggttcaagcaatttgcctgcctcagcctcccaagtagctgggattacaggcatgtgctaccatgcctggcgaattttgtatttttagtagagacagggtttctccgtgttggtcgggctgatctcaaactcccgacctcaggtgatcagcccgccttggcctcccaaagtgctgagattacaggcatgagccaccacacccagcctttttgttgtttcttctgagagatttcttcaactcaattttccaacccttctattaaattttttaaattccagatattctatttgcagccggcaaggactcttcctgcgctctgcttgttttccaaagcattccgttctagtttttatgggagcatcatcctttcatgtctctaaggataatcagagtggttaaaatgttcttgaagttttcttctgttccctgcagtagctctgtttcctccagtttcctctttcccaagtgattggtctgtctcatatacctagaggtcttgctttgcattcacatctaagggcaaaaggcgctaggatgcagtgcggaggtccattcgctttgtcgtaaggtttgtgcctttcttagtcctgcagtggttgagtaaaacctgaccatcccacaccctcaaatactaagtgcccctgggtagtgatgtggaggggccttcttattaatgtgaggaaatgcttgtgttataggttgtggtgagaaacgctggttacaaaactatatcaaagtaaaaatgtattaatgcacagtaaagacacctggaaaaaaaatgccctttaatgctcacagaaggtctctccgaggggcagccccaccaccctcctgtttcccttcctgcatttccacgtttttctgggcccagatgcagcctcccctcccacccctggtccctccgccttggcttccggctgtcgctttcatccctcctcctcatcagccccttgcagaactccagggtggggcttctgagtctcgctggcagtatgggctccataagtcttgctggacaccgaaattaagttctgcaggtgccgtctccagaatccccagcacagatagacaaacccacatctcaggggtggggggtgcagacctgcccccagnnnnnnnnnnnnnnnnnnnnnnnnnnnnnnnnnnnnnnnnnnnnnnnnnnnnnnnnnnnnnnnnnnnnnnnnnnnnnnnnnnnnnnnnnnntcccagctgccctctgtttatatgtctcaccaatgtcaagggaaaccagaactggatagcagttgaaacacatattttgttcgggactattgtaataggggaaaaaagattttagtatagacctgggctcaactctcaatgtggcacaggcaagtggggatttagatctgaggagcagggcggggtcagtgggtggaaaattactggcacgaaacacctgtctggaggattctggctaaacccaggaaacaggaagcttgctgagggcaggcagggttagcagacatcgcctgggggtggcggaggctgagaaccctacccaggtaaaatgaagcttgctgacggcagacagggttagcagacacggcctggaggtggcagaggctaaggaacctacccaggtaaaacgaagcttgctgacggcagacagggttagcagacacggcctggaggtggcagaggctaaggaacctaccaaggtaaaatgaagcttgctgaaggcagccagggtgagcagatattgcctgggggtggcggaaactgaggaccctacccaggtaaaaggaagcctgctgaaggcaggcagggtgagcagacattgcctgtgggtagcagaggctgaggactctacccaggtaacaggaatcttgcttaaggcaggcaaggtgagcagacatcgcctgggggtggcggaggctgaggactctacccagataacaggaatcttgctgcgggcagccagggtgagcagacgtcgcctgggggtggtggaagctgaggaccctacccaggtaaaaggaagcttgctgaaggcaggcaaggtaagcagacatcgcctgggggtggcggaggctgaggaccctgatcagatatggggggatggaggcttcttgccaaactgacttagcagagttcttgctgaatctggattttataaggcagaatgcagatgagcctgtgagaaggttctgaagccggactacagtttggtcaagcaaacaatcttgtcatggattcagtcatataaataagggtcacccagcccaggggaggtgccccaccccatctgttccctctccctccccacactgagtccgaacctttcaggctttgcccccttcacacactccaaatttattcttctacttctcttcctgcaggtaccagactccggccacccagcgcttacctgggactgctgggcctctgccccgtggggacctgtcctccaggaaacaaggccagacacaggagggcagggaggactcttctccagggccggtgcgccgtctcttcagccccatggcacttgacttaggcagagcctacagcaccctcaccccagtccctgcagccaccaggaggtggtccccctcatcccattagccatcaccgccattcacagaggtctcggactgaggctggcagggggagcaccatgacccaagatcagaaccctgttgtctgtgcctctggagaggtgggggcaggagctgagggagggtttgggtggagaggggagaagatgcagtagcaggagcagatgctggcaggtagagacaaacttttatgacctttgccttctgacctttgcctctggccactgctccaactaaaacagaatggccccctctgggaacagggcttcctatgggctgggaagcatggagcccccacagtgtggctatgcaggggagtgaggaccaggtgggggcaggcctgtgggggtcacagagctgggctaagcttcagagggaagtggcccctgggagggggaatggctggggttaagaccctgggttcccacgcccccaaaacagaagtagaattagggagaaaggacccccaagaccaaggacggcacctatcagaggagctctccacgggcaggaggtgtcccagggtgagggtggccaggacaggtctagggaaatgcaggtggagcaggacccagagatggattggagatgccggaggggaggcttcctagcgggagcggagacaggcactgcagacaagtgtcagcgggaggggctctgggtggggaagaagactgggacttggaggaagacctctccagggagaagggaggagggggaaggagaaggggaggaagtgggaggaggagagtgctcatcctggaagccacagcctcggagagaactttctagaaggaaggcatgaccatcagtgtcccaggatgctgagaggccaggaaaggtgaggcctcaaggcgccatggggttgtggtgaccccaagatcactgggcacagagcagggatggctgggggtggaaggggaggggcgcgggctgaggttctagggccccaaagccaggtgtgatgtggctctagggggagtgaggaaggggagaatgtccctctgagcgtgcctcttggggaaggcaggggttctggctggggcttctccactcccaggaaaggaggtggtgtggaaggagcgggtgggacggaggagagagcgccccgcggccgcaggaccagcaggtgggggaccagggtcagcgctgctggaggggccttagcgcgacaggactggccagagaccggggatgtggcacagaaagagttaaagggcaccccagggaccgccctgccggtccacccatgtcacccatgttggcccctactccagcccccgtctgctctgcaggggaaggaaccgggagccgcggtgggggcgactgggggtgtcggtctttccagaaaatcaggcaggcatcaggaaagaaggggcgagaacccggggacgcgagaggaagggggcgagggggnnnnnnnnnnnnnnnnnnnnnnnnncgcgtcccagggcgtcccctcccgggactgggacccaccgcgaccaccacctgctgggccagggtccgcgggctcaggggtctgcaggattagggtctgcggaaccaggacccgtgggacaaaggtctgtggggcgcgggtccgcggggtggaattcagcgcgccgagtctgcgtatggccggggtacgaggcgctccctgcgcagggtgggcaggaccgaagctcgccgggagctgcgcggagggcgggcggggaccctccggtgccgctcccaccccgcggggccgcccccgagcccgccctccgccgccgccctcgccctcgtcgccgccggaaagtttgcaccgaccccgatctggcagcgccgcgaagacgagcggtcaccggcgcccgacccgagcgcgcccagaggacggcggggagccaagccgacccccgagcagcgccgcgcggtgagcacctgggccgcggacccgaggggacgttggggagtcgacccggtggggacagagaccgcggggcgggcgcggcggggccgggggcgcggggagcggggagccggccgggcggtctccggggtccgggctggtgcgctcctcagtcccgtcagacacccccgttcccaaccccggctcggacaccacccggtcctgcaccgtcgggcaggtccaggggtctcagcccctcccccgttctctggtcctggggggcgcggctgggggcgggggtgtcgctggccgcctggcgccctgcggcggccacactgcagcggccacactccccactcagggccccgggccccgccgccctggggagcgcacaaagcgccgcggacgcgtccccgaggcgcggggtctcaccagcgctgtctcccctcggtgggctcctgccccgaggactgcccggtggcaccggcgcggcccaggatggggtgaggggtgtctgcgccccgcctggccgctcctcttccgcggcccacactggcgactttgaccccggcaagcgggtcactgccctgcccggctccggcccccccggcgccccaccacccggccgactcggccaccgggcttatgctccgactctgaaccgactgaccccggccccctcggcgcccgcatcctccaaggaccggccagggctgctctctgcccttggtattggggacatcagggttggggggtctgggtgcacccacgcctgccccgcccccacggggtgagggcgcagggatagggctttgtcaacagcctgtggcccctgatcccgccccggtgccctgaccttccactaccttctctggtttcacaaaaacatcccggctcccatcccggagctcctcaaagcgtctgagaggccccttgcggacgccctgggagccccgctgccttcctggaccagtggccgctccacccatcctgggggcccagctccaggtctgcgggtccctcagccgcccccagtgggaatcggtggagcctgacgcagccaggagcgcccaagagtcacgtgttctgccagggaggacatgggacaggacacggggtgccagccctgcaaagcggccggggcagtggagctcaggtggccctaagccctggtggtggctggtgtggcccggcaggcagctgtgggagggaggaagggggtggcatgcggtgggggtctagagaaggcgggcagggcacctcgggagcccccccattgggcacctcgggaaccccccacattgggcacctcgggaaccctcccattgggcacctcgggaaccccccacattgggcacctcgggaacccccgcattgggcacctcgggaaccctcccattgggcacctcgggaacccccctattgggcacctcgggaacccccacattgggcacctcgggaaccccccctattgggcaccttgggaacccctcccctaattctcagctgactccaaggcctgagaaggagcttggtcacctggactgtgaaggtggagggtggggtccctggtgggtcgtcccacctaccagctgtgtcgccggaagggtaatacggagcactgtggccccggggagccccgagtggcagctccacagctgggagtttctgtccactccttcagtcaacaaacattgatcctgggctgaccggggcccgggggtgtcagtgtctcctctcgggggagagggctgggtgagatcaacagaggagcctcccttcttcccttcaggctggtgtcaccttcagtgatggggcagggtccccacttgggaagttaaatcgtcgtccccgtcccaggaccacagcagcctcagccctgctctccaggccaggctctctcatgggtgctcagctggaaattggtccccccccggctccacccacccctgttggggtgaggagctggagtctccctacccatatgggacccaccacccgcagggaacggaggacgctcacacttctgcacctcctgcctcactatcagagacccagtggagaattgcctcccacctcacctcttgtattcagaggccctgacccctagggatccgggactaggggtgccctatggggagcccacctgtggcctgtggatgctgagctgtcgggggaatcctccaggatccccagccccaccttcccaaccttctgttgaggctgaggggacacagagccccactcctgggtcctgactgtttcaaagaaaggcctgggggactgggcagccaacccctccctcggctcgctggggtctccagactggctgcccggctggaaggtggggccctggcacgcgaggacctcatgtgtggaggcactggcttggggggtgctcccagtggctctagagtcaacatgacaggcatcgaatggctcctgtttctctggcagagttggggcagagccaggcttggccacgctgggctctaaggggctgtcattttgcccagggagctcctggctgggtggtcctccccccagggtgagcacgcgtcccccccacccccacttcgaggcgcccaggcagggaacagctcattggccagtgtccttcctccttgtcccccgcctgcatctccaccatccaccctgctccagctgccccttgtccctctccccgtcccctgcccagagccccaggtctcccctgcacccctgagcctgcccacctagcagtgcccctcgtccagggcccctctgggttgggggtgcacacagtggggagaggcggctcctgctgctcctcacccagcccggctcagtggccggagccgcccaggacagtggcagtagatggggctgtttgatcaggatcagggaagataaggccccttgcgtgaccccagagctggggacgccaaaactgcccctcctcccccacccgcctgccgctgtctccgccagggagaggcccctactctgtgggtccttcgccccagcaccaagcctgcatggctgctcacctggctcaggaactggggatcagcgacacacgggtcctgcctcccatcggcccctacatgagcccagggtccaagggctgcggttgggagctctttagcagtctgtgacgcaggtgcctgtccctgtcattcagctgtcacactgcttggggcatctcaggccccgttagcggggcagccctgggtggagctggccccacgcgggctcacccagccgctacctggaggaggctaaaatccaggctgtcccgtggcagccagcagtccaggcctgcccggaaaccctctgctccagctgcagccttcgcccatctccttgcccctctccccggcttccccctggcactgccttccagctggctggccctccatctgcccagccatccatccacacctcttattccatttgagggtgccccaaagaagagcccgtaacagcccgggggctcatagccagccactcgcgggaccccgcacatgcacgtggacccacaggaagaccctccctgcttctcccacagaattcagttggtgcagaaactgggctctgtagcaacgaaaggccgatttgtgtagctgttgccaccccgaactcccagctcagatgctggctgtggcatggggaccaggggctgtgactcccacagccctggcaggcaccacgggggatgtcctccccaccctgtgcccccaccctaggccagctcctcctccaagtcgacgcccgcagtgctaacctcaaaggactgtgcagccagcctgtggcgtcccatgggatccaggaagcccaaccgagccttgcacggcacccacgaggcacctaggcaccccggtgctgggcagggggcacacatgtgacacagacccctgagtgtgggccccacacacttggcctggcacagctgcaagccagcccagccactttgctcgctgtggcactggggccaagtgatggaaggtccaggcaccgccaccctcacgcttggcacattggctcaggtcagcctggcaagccagctttcccaggggctaagaataggtgaggaggatggtgaggaagcagccgggggctgtcaactgagggaggaggtcaccatctggggaggctggtcccccacccaagagcattgggtcaccctgcaggaaggtggctgccaccagcaatgagacgaggggctctgcgaccctcagagctgccagccagccagccctgggtggcaagagtgactcctcctggggtctcctccctcctatcgccctctttttttttttttttttttttgagacggagtctcgctctgtcacccaggctggactgcaatggcgcaatctccgctcactgcaagctctgcctcccgggttcacatcattctcctgcctcaagctcccgagtagctgggactacaggcgcctgccaccacgcctggctaattttttgtatttttagtagacatggggtttcactgtgttagccaggatggtctcaatctccagacctcgtgatccacccccctcggcctcccaaagtgctgggattacaggtgtgagccaccacgcccagcccccagctccctctttatccctaggaccctgaggctcagaggggcagcttcaggggaggacaccccactggccaggacgccccaggctctgctgctctgccactcagctgccctcggaggagcgtacacacccaccaggactgcattgccccagctgtgcagcccctgccagatgtgggaggcagctagctgcccagaggcatgcccccctgccagccacagcgacccctgctgctgttgctgctgctgctggcctgccaggtgaggactcacagcaccctcagcacccaggggccctcctgtgaggactgcacactgatggctctctgtctgcctgcctgcctgcctgcctgtctgcctgcctgtctgtctgtctgcccgtctgcctgcccatctgcctgtctgtctgcctgtccgtctgtctgtccatctgtccatctgcctatccatctgcctgcctgtctgcctgtccgtctgcctgtctgtctgcctgtccatctgtccatctgcctatccatctgcctgcctgtctgtcggcctgcctgcctgcctgtctgtctgctgcctgtctgtccgtctgcctgtctgcctgtccgtctgcctgcctgtccgtctgcctgtccgtctgcctgcctgcctgtctgtctgcctgcctgtctgcctgcctgtccgtctgcctgtccgtctgcctgcctgtctgcctgcctgtctgcctgtctgcccgtctgcctgtctgtctgcctgtccgtctgcctgtctgtccgtctgtccatctgcctatccatctgcctgcctatctgtctgtccgtctgcctgcctgtctgtctgcctgtctgcctgtctgtctgcctgtctgtccatctgcctatccatctacctgcctgcctgtctgcctgtctgtctgcctgtctgtctgcctgcctgtctgtctgtctgtctggttgcttgtgcatgtgtcccccagccacaggtcccctccgctcaggtgatggacttcctgtttgagaagtggaagctctacggtgaccagtgtcaccacaacctgagcctgctgccccctcccacgggtgagccccccacccagagcctttcagcctgtgcctggcctcagcacttcctgagttctcttcatgggaaggttcctgggtgcttatgcagcctttgaggaccccgccaaggggccctgtcattcctcaggcccccaccaccgtgggcaggtgaggtaacgaggtaactgagccacagagctggggacttgcctcaggccgcagagccaggaaataacagaacggtggcattgccccagaaccggctgctgctgctgcccccaggcccagatgggtaataccacctacagccccgtggagttttcagtgggcagacagtgccagggcgtggaagctgggacccaggggcctgggagggctcgggtggagagtgtatatcatggcctggacacttggggtgcagggagaggatagggctggaggactcacccgggaggcagtgcctgggttcggatgagggaggcagccaccactgggcagaggggggcaggtgtggcagcctccattgggcagagggagcagatgtggcagccacaggtttggcgatgcacctgggaaggatgaaaatggcattggggttcagcccccagagagggaggtgctgagagaaggtcacggagaatgggggaccccagtgtgggtttggggcacatttgagatggggggtctccaagggaaggtgtcctgcagagctgcaattcagggctgggctgggcgtgctagcggaggctggtccaggggaggtggatggtcaggtgaggaaggtggaggtcagatgggggaggtggaggtcaagtgggggagggagcagcccaggccatgtcctgggcgaggtgacggccgagctcaggcttccagagagaggagagaggcctgctgagggagccccttctcccaccctgccctgccctgctctgccctgccctaccctaccctgcagagctggtgtgcaacagaaccttcgacaagtattcctgctggccggacacccccgccaataccacggccaacatctcctgcccctggtacctgccttggcaccacaaaggtacccatagaggggaggaactgtggggggggcgggcccagggtggggctgaccccagcctccccccacacccccagtgcaacaccgcttcgtgttcaagagatgcgggcccgacggtcagtgggtgcgtggaccccgggggcagccttggcgtgatgcctcccagtgccagatggatggcgaggagattgaggtccaggtcagtgggcggcaggcaggcgcggtggggctggatgggaacgggcatgggggcccctgcctggccctcacaggccactgtaactcgcagaaggaggtggccaagatgtacagcagcttccaggtgatgtacacagtgggctacagcctgtccctgggggccctgctcctcgccttggccatcctggggggcctcaggtaggattccgccagcgcccggggcggccgcagaggacagggaggaggacgggcgctgactggctgtgcccacagcaagctgcactgcacccgcaatgccatccacgcgaatctgtttgcgtccttcgtgctgaaagccagctccgtgctggtcattgatgggctgctcaggacccgctacagccagaaaattggcgacgacctcagtgtcagcacctggctcagtgatggagtgagcccccctcggcggccccaggcaggtgggtgggtgggcagccaggcaggtggccacgtagccgcgctcacactgcacctgtaccaggcggtggctggctgccgtgtggccgcggtgttcatgcaatatggcatcgtggccaactactgctggctgctggtggagggcctgtacctgcacaacctgctgggcctggccaccctccccgagaggagcttcttcagcctctacctgggcatcggctggggtgagtgggctggcatgagagggggttaaggcaggctgaccaagcctttgggaccacagctgctgccccccacaggtgcccccatgctgttcgtcgtcccctgggcagtggtcaagtgtctgttcgagaacgtccagtgagtatgagcggctggacagcctggggagggaccggggggctggggtgcggcgctctggcctgaggcagggaggggccggggatgagcctggtgcctggggagggggtcatttgtgaccttctcccttccttttctgagacccgaattagatcctggcaaaatcgggacgggggtgctgaggggcggaggggctgggggctgtgccccagtatgtgagtggcctggcctcgcaggtgctggaccagcaatgacaacatgggcttctggtggatcctgcggttccccgtcttcctggccatcctggtgaggaaatgaagagccaggagcgcaccccaggcccctcctcccttggcgtcctgaggctgccccaggagacagcagcatcctgtctgagagcgctgggagggagccggcacccagacaggacaccaggacactggccagcaccctggacactgagccaggctgttcctccctggctgtgtgcccaccagccccagggctatgtggcccagggcctatcttgctgccaggcccacctgcaggagggtcaggtggggccttccaagggcacagagctgttccctggggctcgggatgcccctgactcgcacccttctcacacagatcaacttcttcatcttcgtccgcatcgttcagctgctcgtggccaagctgcgggcacggcagatgcaccacacagactacaagttccggtgggtgccgcggcagctggcgtctcgagacctggagaccctcagggccagagggcagctgggggtggggactccaagctccacgtggatggtgcgggccgagggtgggggcggtgggtgactcaggcgctgcctctgcaggctggccaagtccacgctgaccctcatccctctgctgggcgtccacgaagtggtcttcgccttcgtgacggacgagcacgcccagggcaccctgcgctccgccaagctcttcttcgacctcttcctcagctccttccaggtgcccgcccgcccgccggctcccccgcccggggcgcagtgtgccacccctgaccaccctgtctctccagggcctgctggtggctgtcctctactgcttcctcaacaaggaggtaggtgggagtgggggcatctgagaccatcagcactggccgtcggggtcaggggcagagagaggcacagggatgccagccccacccctgcccgggggttggaacacgtggggcccaagcctttccctccccctgctcttattgggtgcagttgccatggcgctgggtgtcaggcccccaggacaggttggcctcagccccatcgctacggtgtccaccgtgggggtccccaggtgtctgcagactgctttccgtggcgatgctgggtggcatagctgtgcccagcagggagcttgtgtcgctctgcacccctcagagcggagactgggcatctccgatgaggcccacagcaggtcccggtggggtggagaggacaggcaggccctaggactggcctgccccgtccccctccccaggtgcagtcggagctgcggcggcgttggcaccgctggcgcctgggcaaagtgctatgggaggagcggaacaccagcaaccacagggcctcatcttcgcccggccacggccctcccagcaaggagctgcagtttgggaggggtggtggcagccaggattcatctgcggagacccccttggctggtggcctccctagattggctgagagccccttctgaaccctgctgggaccccagctagggctggactctggcacccagagggcgtcgctggacaacccagaactggacgcccagctgaggctgggggcgggggagccaacagcagcccccacctaccccccacccccagtgtggctgtctgcgagattgggcctcctctccctgcacctgccttgtccctggtgcagaggtgagcagaggagtccagggcgggagtgggggctgtgccgtgaactgcgtgccagtgtccccacgtatgtcggcacgtcccatgtgcatggaaatgtcctccaacaataaagagctcaagtggtcaccgtgcatgtcctggaaagcagggctggaaatgctggggccgaagcagtgggggatggaacagcggtgggtggtcagcgccagtgcgggctgttgaagggtccccctgctgtcccagttcactcagagttggcactggaaccccggaggatcccgaaggcagccagcctgtgcccatctgagcaggtcctggccaccttcccatcctggttctggcgggcagtccccctggacgctttggccaccagagggtcaccattcaccagcagagacgtgaggggcacagtggctaaggcggcatgaggcatcacagtcccctgaccgaccccatcagcactggattcacccgagggcgtcttctccctggaggccgtgaggacactggcacctggctcatcggcccgcccttcctctgagcctcctggcctccgtttcatctcagctccagccccctcgggcaatttacaggccacgtagcagattgaagcgggaagaaatgggcctgaacattgccgcgggtccaggcgacggaggagggcaggttgcccaacttctgcacaggacccggggtgcgccacacacacgccagtcctcgtgccacacagagaggtccggcctacgccagtcctcgtgccacacagagaggtccggcctacgccagtcctcgtgccacacagagaggtccggcctacgccagtcctcgtgccacacagagaggtccggcctacgccagtcctcgtgccacacagagaggtccggcctacgccagtcctcgtgccacacagagaggtccggcctacgccagtcctcttgccacctcgtggtgggtgggcgccctgcttgccagccagggagcaccaggaaagagctgcctcctgcgtgctggacacaggaggtgcttcagggtggggtctcccattgtgtggggcccaacctgagtctaagggcccagggaccacacagcgggggtggagacaaattcagggtagaagctgtgaggggcctgtggtcagccccccggggggtccctgcagcaggcactgtgagacctactgaggtgtgtgcatgggctggggaaggagccagtcaggtgcccctgctctgaggagctgctgggaagtgctgctgggccctgggggaaggggtgctcacagcccctgcctgggccacgtgggctggagccgctcaggcagagccggactaattggggcaaatgaggggacaggaggcctctgaggaaaggtaaatagaattactcacccgccaggcactggggccctcctgggggggccctcaccctgccacccaccacagggcctgcatgcagcagggagggaagtgagctgattaggcaaggctggacccttctggggccctggggttgctgtgattgggacggcaaggccaggagacggtcccctgagctgcacctgctggaggcctgtgatctcagaccttaaggcttcaggccagctctacgcccctccggcctcaggtcctggctctcctctgagccctggatgcccgggtgcctgtgtgggcacgaggctgctccgagtcagcacacggaggtggacattctccttcatgccagctgagctcagggctggtgactgccctggggaaactgcccctcacctgggacctcctgacagccctccccattcccgagtccctctgcccttgtcctctttcacctctgtcccgccctcatccctaagggaactggagcaggctggtggagttgggtggagttggggactggcagggggtggactcacccaggcaataaacactggccctaaccaggcagtcctgcaggcaggtaggtggagggactgttttttttcttttttggagatagagtctcactctgttgcccaagttggagtgcagtggcatgatcttggctcactgcaaactccacctcccaggttcatgtgattctctgcctcagcctcccgagtagctgggattataggcgtgtgccacgacacctggctaatttttttttttttttttttgagacggagtttcactctcgttgcccaggctggagctcaatggcgcgatctcagctcaccgcaacctccgcctcccaggttcaagcgattctcctgccttagcctccctagtagctgggattacaggcaggtatgtgatgcccggcatcccaaaggggtatctgcaagagttgggtgctgtgtgtgcatggctgggaggaagatgactttgataccctggaatctggtgtctgtggacacaaaaatactactaaaatgagagtggagaccaggaaaaaggaagacatgaactacatgaaggaccaaatctaggagagtcagaagtgcgtcacaggaataggggaccttgagccagacagaaggctcagcagagacaccctcaaggggatgaaagggattgagtgcactaatatttagaggagagagttcaggacttgattagtgactagtacatagaaaactaaacaaatgaggctgggtgcagtggctcatgcctgtaatcccagcactttggggggccaaggcgggcgaatcacctgaggtcaggagttcgagaccagcctggccaacatggtgaaacctcgtctctactgaaaatacaaaaattagccgggcgtggtggcgggcgcctgtagtcccagctacttgggagcctgaggcaggagaatcgcttgaacctgggaggcggaggctgctgtgagccaagatggtgccattgcactccaccctgggtgacagagcaagactccgtctcaaaaaaaaaaaaaaagaaagaaaaaaccaagcaaatgaaaaaagaaggcaattaataattccaaagaaaagaaaaatttgggcagaaaagaacaaaacaagcagaatttaccatgactcagttctgaatacaaacacagacatcataatgtaaacaccaacactgatgcaaccagaatcatgggagaaaaaagatctagggagggtggtggacgggaatatcacgtatgtactgggggtaggggagagaacaaaatgggaaaaatcaagaataattcacgttagaaataaaaatacagagcaaaatttaaaaatgcaaagaatgaggtgaagagttcaaagtggtcacctcggggccgggcgcggtggctcacgcctgtgatcccagcactctgggaggctgaggcgggcggatcacaaggccaggagtttgagaccatcctggctaacaaggagaaaccccatctctactaaaaattagccaggcgtggtggtgggcgcctgtagtcccagctactcgggaggctgaggcaggagaatggcgtgaacccaggaggcgcagcttgcagtgagccgagatcgcgccactgcactccagcttgggcaacagagtgagactccgcctcaaacaaaacaaaacaaaacaaaaaaacaaagtggtcatctctaggcaaggtgggtgggagatggctagggctgcaggtccactacgtgagctggctcagcctatccccagacaccctgcactcactcagcccggggtcctccccctgcactcactcagccccgggtcctcccctgcactcactcagccccgggtcctccccctgcactcactcagccccgggtcctcccctgcctgctctttctctgaccctgccctccactgttcctttttcttctttctctccctgttgtgtccaggaaccaggcaccaccctcatttcttcttgatcaatctttaaaaaccagcagtgctcagctaactcttcatctatctcccccgacctggggctctgctgaatccacgctttagacccagctatcagctcggcatgtacagctggatgtccacaccgagctgctcaccctgtccccagcttcttcctcccactgtccactgcagaagcctcctaacaggacccctgctgctaccccggaccctgcaacccattcccacacagcagccagatgctttgacacccgaagtctcctatgaatccgatgaggcctctgcaccacacctcattttacagaagtacaggggaaacaggggtctgttgacaccacagagatgcagctggccaaaggcagaatgtggggtacacgactgtcaaacgccaggggtccttacacgaatggtggaaaaagaggggcatgttacggatggaggctcgggacacatgggcgccgccttcccatgctgccagcaacccaccaggaacctatta

SEQ ID NO: 12 - DNA, 3182 bp, Hepatitis B virus
  source 1..3182: mol_type = genomic DNA
aattccacaacctttcaccaaactctgcaagatcccagagtgagaggcctgtatttccctgctggtggctccagttcaggagcagtaaaccctgttccgactactgcctctcccttatcgtcaatcttctcgaggattggggaccctgcgctgaacatggagaacatcacatcaggattcctaggaccccttctcgtgttacaggcggggtttttcttgttgacaagaatcctcacaataccgcagagtctagactcgtggtggacttctctcaattttctagggggaactaccgtgtgtcttggccaaaattcgcagtccccaacctccaatcactcaccaacctcctgtcctccaacttgtcctggttatcgctggatgtgtctgcggcgttttatcatcttcctcttcatcctgctgctatgcctcatcttcttgttggttcttctggactatcaaggtatgttgcccgtttgtcctctaattccaggatcctcaaccaccagcacgggaccatgccgaacctgcatgactactgctcaaggaacctctatgtatccctcctgttgctgtaccaaaccttcggacggaaattgcacctgtattcccatcccatcatcctgggctttcggaaaattcctatgggagtgggcctcagcccgtttctcctggctcagtttactagtgccatttgttcagtggttcgtagggctttcccccactgtttggctttcagttatatggatgatgtggtattgggggccaagtctgtacagcatcttgagtccctttttaccgctgttaccaattttcttttgtctttgggtatacatttaaaccctaacaaaacaaagagatggggttactctctgaattttatgggttatgtcattggaagttatgggtccttgccacaagaacacatcatacaaaaaatcaaagaatgttttagaaaacttcctattaacaggcctattgattggaaagtatgtcaacgaattgtgggtcttttgggttttgctgccccatttacacaatgtggttatcctgcgttaatgcccttgtatgcatgtattcaatctaagcaggctttcactttctcgccaacttacaaggcctttctgtgtaaacaatacctgaacctttaccccgttgcccggcaacggccaggtctgtgccaagtgtttgctgacgcaacccccactggctggggcttggtcatgggccatcagcgcgtgcgtggaaccttttcggctcctctgccgatccatactgcggaactcctagccgcttgttttgctcgcagcaggtctggagcaaacattatcgggactgataactctgttgtcctctcccgcaaatatacatcgtatccatggctgctaggctgtgctgccaactggatcctgcgcgggacgtcctttgtttacgtcccgtcggcgctgaatcctgcggacgacccttctcggggtcgcttgggactctctcgtccccttctccgtctgccgttccgaccgaccacggggcgcacctctctttacgcggactccccgtctgtgccttctcatctgccggaccgtgtgcacttcgcttcacctctgcacgtcgcatggagaccaccgtgaacgcccaccgaatgttgcccaaggtcttacataagaggactcttggactctctgcaatgtcaacgaccgaccttgaggcatacttcaaagactgtttgtttaaagactgggaggagttgggggaggagattagattaaaggtctttgtactaggaggctgtaggcataaattggtctgcgcaccagcaccatgcaactttttcacctctgcctaatcatctcttgttcatgtcctactgttcaagcctccaagctgtgccttgggtggctttggggcatggacatcgacccttataaagaatttggagctactgtggagttactctcgtttttgccttctgacttctttccttcagtacgagatcttctagataccgcctcagctctgtatcgggaagccttagagtctcctgagcattgttcacctcaccatactgcactcaggcaagcaattctttgctggggggaactaatgactctagctacctgggtgggtgttaatttggaagatccagcatctagagacctagtagtcagttatgtcaacactaatatgggcctaaagttcaggcaactcttgtggtttcacatttcttgtctcacttttggaagagaaaccgttatagagtatttggtgtctttcggagtgtggattcgcactcctccagcttatagaccaccaaatgcccctatcctatcaacacttccggaaactactgttgttagacgacgaggcaggtcccctagaagaagaactccctcgcctcgcagacgaaggtctcaatcgccgcgtcgcagaagatctcaatctcgggaacctcaatgttagtattccttggactcataaggtggggaactttactggtctttattcttctactgtacctgtctttaatcctcattggaaaacaccatcttttcctaatatacatttacaccaagacattatcaaaaaatgtgaacagtttgtaggcccacttacagttaatgagaaaagaagattgcaattgattatgcctgctaggttttatccaaaggttaccaaatatttaccattggataagggtattaaaccttattatccagaacatctagttaatcattacttccaaactagacactatttacacactctatggaaggcgggtatattatataagagagaaacaacacatagcgcctcattttgtgggtcaccatattcttgggaacaagatctacagcatggggcagaatctttccaccagcaatcctctgggattctttcccgaccaccagttggatccagccttcagagcaaacacagcaaatccagattgggacttcaatcccaacaaggacacctggccagacgccaacaaggtaggagctggagcattcgggctgggtttcaccccaccgcacggaggccttttggggtggagccctcaggctcagggcatactacaaactttgccagcaaatccgcctcctgcctccaccaatcgccagacaggaaggcagcctaccccgctgtctccacctttgagaaacactcatcctcaggccatgcagtgg

SEQ ID NO: 13 - RNA, 3318 nt, Homo sapiens
  source 1..3318: mol_type = mRNA
gtgatgcgtagttccggctgccggttgacatgaagaagcagcagcggctagggcggcggtagctgcaggggtcggggattgcagcgggcctcggggctaagagcgcgacgcggcctagagcggcagacggcgcagtgggccgagaaggaggcgcagcagccgccctggcccgtcatggagatggaaaaggagttcgagcagatcgacaagtccgggagctgggcggccatttaccaggatatccgacatgaagccagtgacttcccatgtagagtggccaagcttcctaagaacaaaaaccgaaataggtacagagacgtcagtccctttgaccatagtcggattaaactacatcaagaagataatgactatatcaacgctagtttgataaaaatggaagaagcccaaaggagttacattcttacccagggccctttgcctaacacatgcggtcacttttgggagatggtgtgggagcagaaaagcaggggtgtcgtcatgctcaacagagtgatggagaaaggttcgttaaaatgcgcacaatactggccacaaaaagaagaaaaagagatgatctttgaagacacaaatttgaaattaacattgatctctgaagatatcaagtcatattatacagtgcgacagctagaattggaaaaccttacaacccaagaaactcgagagatcttacatttccactataccacatggcctgactttggagtccctgaatcaccagcctcattcttgaactttcttttcaaagtccgagagtcagggtcactcagcccggagcacgggcccgttgtggtgcactgcagtgcaggcatcggcaggtctggaaccttctgtctggctgatacctgcctcttgctgatggacaagaggaaagacccttcttccgttgatatcaagaaagtgctgttagaaatgaggaagtttcggatggggctgatccagacagccgaccagctgcgcttctcctacctggctgtgatcgaaggtgccaaattcatcatgggggactcttccgtgcaggatcagtggaaggagctttcccacgaggacctggagcccccacccgagcatatccccccacctccccggccacccaaacgaatcctggagccacacaatgggaaatgcagggagttcttcccaaatcaccagtgggtgaaggaagagacccaggaggataaagactgccccatcaaggaagaaaaaggaagccccttaaatgccgcaccctacggcatcgaaagcatgagtcaagacactgaagttagaagtcgggtcgtggggggaagtcttcgaggtgcccaggctgcctccccagccaaaggggagccgtcactgcccgagaaggacgaggaccatgcactgagttactggaagcccttcctggtcaacatgtgcgtggctacggtcctcacggccggcgcttacctctgctacaggttcctgttcaacagcaacacatagcctgaccctcctccactccacctccacccactgtccgcctctgcccgcagagcccacgcccgactagcaggcatgccgcggtaggtaagggccgccggaccgcgtagagagccgggccccggacggacgttggttctgcactaaaacccatcttccccggatgtgtgtctcacccctcatccttttactttttgccccttccactttgagtaccaaatccacaagccattttttgaggagagtgaaagagagtaccatgctggcggcgcagagggaaggggcctacacccgtcttggggctcgccccacccagggctccctcctggagcatcccaggcgggcggcacgccaacagccccccccttgaatctgcagggagcaactctccactccatatttatttaaacaattttttccccaaaggcatccatagtgcactagcattttcttgaaccaataatgtattaaaattttttgatgtcagccttgcatcaagggctttatcaaaaagtacaataataaatcctcaggtagtactgggaatggaaggctttgccatgggcctgctgcgtcagaccagtactgggaaggaggacggttgtaagcagttgttatttagtgatattgtgggtaacgtgagaagatagaacaatgctataatatataatgaacacgtgggtatttaataagaaacatgatgtgagattactttgtcccgcttattctcctccctgttatctgctagatctagttctcaatcactgctcccccgtgtgtattagaatgcatgtaaggtcttcttgtgtcctgatgaaaaatatgtgcttgaaatgagaaactttgatctctgcttactaatgtgccccatgtccaagtccaacctgcctgtgcatgacctgatcattacatggctgtggttcctaagcctgttgctgaagtcattgtcgctcagcaatagggtgcagttttccaggaataggcatttgcctaattcctggcatgacactctagtgacttcctggtgaggcccagcctgtcctggtacagcagggtcttgctgtaactcagacattccaagggtatgggaagccatattcacacctcacgctctggacatgatttagggaagcagggacaccccccgccccccacctttgggatcagcctccgccattccaagtcaacactcttcttgagcagaccgtgatttggaagagaggcacctgctggaaaccacacttcttgaaacagcctgggtgacggtcctttaggcagcctgccgccgtctctgtcccggttcaccttgccgagagaggcgcgtctgccccaccctcaaaccctgtggggcctgatggtgctcacgactcttcctgcaaagggaactgaagacctccacattaagtggctttttaacatgaaaaacacggcagctgtagctcccgagctactctcttgccagcattttcacattttgcctttctcgtggtagaagccagtacagagaaattctgtggtgggaacattcgaggtgtcaccctgcagagctatggtgaggtgtggataaggcttaggtgccaggctgtaagcattctgagctgggcttgttgtttttaagtcctgtatatgtatgtagtagtttgggtgtgtatatatagtagcatttcaaaatggacgtactggtttaacctcctatccttggagagcagctggctctccaccttgttacacattatgttagagaggtagcgagctgctctgctatatgccttaagccaatatttactcatcaggtcattattttttacaatggccatggaataaaccatttttacaaaa

SEQ ID NO: 14 - DNA, 78001 bp, Homo sapiens
  source 1..78001: mol_type = genomic DNA
cagattccgggtctcatccctagaccaaagatatctgaatcatttggcgatgggtccaggaacctgcattattcaacacacttcccaggtgaccgtaaatgtcaaaagacaaaattacaacaaacttaaacatcttaattggcttcattcatgattctagaatcgggcaagacttcattcctcaaaatagcacaagtgtcccaatgagctgagcagaggaggttggttttatagacagaaaagggctgaaaaaagcagaaacaaagaacaaaaagcagattggtcatttcaaagttactttccttgtaaggcaggaacagggaaacagaacaagagagaaataactgattggtcgcatcgggttacttcaggttactttttgttgtaaggattaaagcaaagggaacttcattatgttgattaaaacggtctgcttgggaaatcagggtgtgtatctctcttctgattttgtgaaaggttatcagtctgatgatgtagaactttagcatgagtgactccattttgatttttagtctagtctgttgagaccctaatgccagaactttttttgtttgtttgtttcgctcttgttgcccaggctggagtgcagtggagctatcttggctcactgcaacctctgcctccagggttcaagcgattctcctgcctcagcctcccaagtagctgggattacaggcatgcgccaccacgcccggctaatttttttttttttttttttttttagcagaaaccgagtttcaccatgttggtcaggctggtctcggactcttgacctcaggtgatccacctgcgtcggtctcccaaagtgctgggattacaggtgtgagccaccacacccagcccttttttttcaagacagggtctctctctgccacccaaggtggagtgcagtggcgccaaaacagctcactgcagcttccacctcctgggctcaggtgatcttcctgcctcagcctccccagcagctgggccccaccacaccggctaattttttaacttttagtagtgacgaggtctgattctgttacccaggctggtctggaactcctggcctcaagacatccgcctgcctctgcctcccaaagtgctgggattacagatgtaagccaccgcgcctgggctcctatgatttttatttaacataatgcaccatggaatttgtgctctgcttagttcagtctgagcaggagttccttgatacttcgggaaacactgaaaatcattccatccccatccattcattcctgcagcacccaagtggaaattctgcgtttcagacagggacactacccttagagagcagtgggcttccccagcagcgtagtgaaacatgatactcctgagtttcatgaaaaaagggcagacatctggccagagctgggaggcaggaaatagagcacggtgccctcctcccatactccagcttggattactgaggctggggcccaggccctgcaggaaaggaggtgcatgactactttaaggccactcactctgtgactcaacgggccgggtcggggctggaactcaatgccctcccgggcctggagagcccacgcgccgtgggcggggctcccggggtcgcctaggcaacaggcgcgcgccgcgcccgagcccagagccccaaagcggaggagggaacgcgcgctattagatatctcgcggtgctggggccacttcccctagcaccgcccccggctcctccccgcggaagtgcttgtcgaaattctcgatcgctgattggtccttctgcttcaggggcggagcccctggcaggcgtgatgcgtagttccggctgccggttgacatgaagaagcagcagcggctagggcggcggtagctgcaggggtcggggattgcagcgggcctcggggctaagagcgcgacgcggcctagagcggcagacggcgcagtgggccgagaaggaggcgcagcagccgccctggcccgtcatggagatggaaaaggagttcgagcagatcgacaagtccgggagctgggcggccatttaccaggtgcgggagcgccccggagcgtggcgggcccttcgcttaggccgcttgaacatcccctcagacctccaggccccagactccctctgggtcttgccctctgcctcgctcctactgcttgaggattcgatgggacagcgacgcactgcgtccccccaccctttgtccccggggcgggcgtgtttctcgccgcagcgtcggagcccccttcgatcccccacctcccttctgttctccagctcgggtgatctctcaagccgggggaccgccggtctgtgctctcaacgcgaatccctcgcaccccgaccccgccccctgcctgtccactctttgtcccctggggtgatttagcacccccactatttccttttctggagtggaccacctcagactctcttcctttgtctccctgggggaaaaggttactccccccgtccctccttcacatttcctttcccctagtctcagtgtgcgtcgagtcccagagatgacagtcccctttcccctttctgttcattcatttattggataggagttggcaagcttattctgtgctaggcaccgcttaggcattggaggtggtgtttgctaatcaggacaggcaagatcctagccttagtggggcctagagtcgaatagggcaatcaaacacaaaagcaaataatttcagatagtgacaggtgctgtgaagagaacgacttcctaacggggtacagggtgactgcatagaaggccggctgtcttagagaaggggatcagggaaggcctgtcaaaggaggagacatttgctttgtgagctgaaccaagaggagcagaaagccgtgagaatatggggctaaagaaccttctagccaggaggcctgcggtacccactccattggggccatgatattattctttcaggcagggactcaggaaggttaacgttttaaccctctctaaaatagcatctttcctcaatgagcagcttagtctttggtcgtggcagagatgaccttgtcttaggagtcatctccttgtgtgttaaaaagttaggaaaggagggtttctcatatatctataaaacaagtagttaaaaacacaaagagctcttcctttcacaagcagctgaataagatacatactcccaattaaatgtcattgcgggggttgttaagattaactaaaaccacacttgcacagtatcttaaataagcgatatacagaatagagagattttgttacttgtgtaaagggagacagcagatgattctgttttcagcttataggctcaaaaggcaaattgtgagatccatcagctgtagtattaaaatctattttgagctccgcttagaaaggaaaaaaggtttaagcagttctttggtatgcttgactaacaaaagcctttttttttggcagccttgattttcatgtggatttacatcaagcttatttgacaggattctttttatttggactgtagtgtgtatattagtttctgctagactaatatttctaaccactgtaatctatatactaataagtatgattgatcagtatataaaatttgtatgccatatctggtctctgaattagctgaatgaattccataagggactttgagactgtgtagacaaattttctgcatcagtttaatgcagtagagtctaaaatgtctttaaatgaaaattgttggtctgaagtgttggagttgattatgatacaccccatcacagtggaagcattgtggagagaagtcttttccactgaaattgactgagttgacaacaagaaatacgtattgtaacttagttcttagttgaattttatttcttacaattttaagccagagtgggttgacctgtcacccaagcatggttaaaattgtattcagcatgcaactagcatggagtgtgtcagtcttcaattcatttccttcattgttcttaagtttttctgccacaattaaaccccacaagttagtcaaggtgttgagattttcactgcttcttaatggattgccacattccctgaggtagtttcttttggtcttagagaattgtcagggccagcttttctcacctccactgtatggatatttttcttttctaagatcttgaaatcagaagcttttctcctaagtgtaaaagtagctctttgtcatacaactgtagcgttttctgaaacagagttcagatgaccttgagtctaaagtggctaactttccaaggtgtgtatcgctttaccaaaaccattatttttcaaggattcaaagaatgtgtttacaattgatagaaaatggaagtttaaaaaaattaatactttatagcatgttgaaatgagggcagccttatacaaagtcatactttgagcttgcctagcctattgtgatcagagaataatgtaatttttgcttacaacttggtaagcaggtcagttattctaacttattttctgattagaacaaaaagatgtaaaaacttgaaaactattgggaaaagaacaaagagtgaagaggacttttgagtgctgaggaatgtggcagcttggaaaacaaactttttaggcagagattctttgctaggtcagtttgataaagtgagcataaccgtatttttaatctttaatgctaatgaatagcatagatgctaataagcatctaggtctataaaaagtcagctttgatagtgtatatagatggctttaaacattgttttctagcatttaaacactttcaaatcatccggttgcttgattgggcctagctgtctaagaggagagaatgagcccagatgaggaaaagagattgattttactgagctagaatgagaggagagagggttgagtgaatgaaaagaatagctcatgtgctcccctccatctgtagtttaagaggggttgggtccggtgttttgcttgttttctcgtctgtaaattctttgattctctgacaccactcactatatttcattgtgaatgatttgattgtttcagataaaggggactgcaataataccttgtgacatgaaggcaagatttattcatgttagaggcaggctttgtaaaatgggccactcttccaattgacatttgtttttatagctgttttcattatgaaatacaatctaatgcctgactaggttaaaaccatgttgtaacaatagttcactaaaattccttactgatatacagcttatgttgttatattccaaaaagatgaatattaaaatttgccaataatgtttatttaaatactattttcttcagaggaaaaaaaactattttatgcaaaggagaaagatctatacactatgactcacttcacttaaaaaaaaaaagactaacggaaatgacatggagagactgggaagttctagtcatcttgagtgacccattagatctaaatgttcttgtttagccctggtttgagtgaactaaatttaggtgtctgatcagtactttggaaatggtgtaaatgcctttgtaattgtctggactgatattagattaactgggagcacaagtagaaatagtgaaggaaagaactttttgctattgttatttgacatcactggcatatttataggaatactttggtgtttttggaagtaagtaaaccaaccagtggttctaaaaagtcagctgggggataatggtaatgccgctgtttcttagctgcaagttatctgccgttacttctcctccattttgcattttatcttgaatagctcctcaaaacctattaaaatacctggtattgaataatgtaattgaatgtgtactgaatttcacagtggaaatgaataagaaatttcctgtggaggttttttgacttagctactgaaataacggccttttgttgtgtgattctttcccttttctctttgttaaagaaaactgtcttgtgatcttgtagattacagaatccttttggcaatttctgttcctagcactgctttttctttctttctttcttttaaatagaaatggggttttgctgtgttgcccaggttggtcttgaactcctggcttcaagcgatcctcccaccttggcctcctgaagttgggattgcaggcgtgagcaggtactttttctgaggcctgcctgagcctatatatattttgcacaatttggcattcctccctacagtgtttatgctgatttgtttctggtaacaactaatactggcaaatcggctgggcatgttactttatgctgcccatattcaggaaaattggaattctagctgggtcattgttcccagatgatgtagtttggcaccagccattccatgttcacattttgagtatccaggagggctggggactttggagtagttggtgattccctctgccacatttcactggttggtcactatggcatcctttccaccacactagtagtctaggttctcagatgttgcttatgagcctgcaatggtttctagtttcacactgcagaaatgagtgaagccggttacccgttaatatggtcccatcatcactagagtaattcattgttctaaaaccagatctgagtctctcactcctctgcaactacttctgattctttcataacacttgtaaagtccaaactcctctttagcatggcagccagcttccagtccttccctcctatgtggcttccattctagccagacaagaaagggcagcgttctccaaactcatcctcgcccttcattcctctataccattgctgagcactttgttgaggatgcctctcccgttcaatctagcttgcatcttccagctcgaatgtgtgcttccttgcaccagagttttgttccgtcacctgtgtgttttcatacaagctggcacatatctcttctaaagccctgctgtcattgtagctgcgtctttacaaacattttttttttaaatttttataaagtcaaggtctcactatattgcccaggctggtctcaaactcctgggctcaagtgatcctcctgccttggcctcccagagtgctgggattataggtatgagacactgtgcccagctgtagctgctactttatatcccaggtctatctccaatggagcccaagcttcctgaggccacctgttgtatctttctcattcatcttgaagtcctctgctcctggcacagagtaggtacctaacaagagttgggattgaattgatggtcagtactttgctagcctgatggtataaagatgtacaaaacatgttcctggctcccactctaggggggcaatgatggaaacaaatagattagcccacattagtaccaatagtagaggtcactctgggagaaggcccccaccacattttgagtcatggcctaatgaggtaatttagtattgcctgctgcagtggctttggaagaaaggctggcattcttagccagtagaagctgataccactgatttgtttcacagaagctttaaatataacaataaatttgtgcttggcctacggtgaactttacaggcaacttggaggtaatatgtttgtctctctaagaattgttgaattcctcttccctcatccctcctgactggttctcacaagcctagcgggcctttgcatgtggttggttcataaaatactttttgattttgggatataaaatatagttctccataaaataacgactgttaccaagtctttgattttttttttcaaactataaatggtaatgacattctttggcctttgatcagaccacccttaggggcaagagagtagtttcatgttttgctttttctagtgtcccctgtgtctgggtatagttgcagtctcagctgtcatactaacagtgctgagtgagtcccttactttctttgggttttggtttctcccttgtaaaaatgatcctggactaactgatcattaagttcaggtcaagtaataaaaatccttaatgtactcacaaatacaatttaatgttcctgaataatccttgtaaaaactgcagcagttactcagttttgtaaggtgtggttgggtactattaggctcaaaagtttataggagctttgtgagtatagttaacaactcaaaagaatggggtgttttttcccgaggggcatgaaatgtttttgataaatagagttcatttgacttggtaatgtggaaaatgagtagccctgacacgtacgctatgcttttgcagtttttctctcaagtagcaattgggtggcttttcctgtaaaagatagaggaactgattcttgagaatttacgaaagcttcaaccctaactaggtatgcaaagaatagttgccctttatgttgtaattttaggaagaaacctacatctggtctaagtttcatttgaataatatgatagtttacacatctgccatatttgagaagaaagtacctaagtctccagcattttagaaataatgctttactttgtgtagaaatggtctttagagtttaatagctgctgccctctcctttttcaaagcagcttgacataatcatgagtatcttgctgacagcttgtaaattttgattgtatgaaaactgaaaataagaccatttcacatggaagattccctcctgccctgaaacagccaaagaaaactgtagccatcaaatctattgatctctgggctttggtacaagtcacactactacaaataaaataataccaagtacttataaatgattttcagtccttttaaagtttatttttttaatattttttttgagatggggtcttgctgtgtcgtccaggctggagtgcagtggcacaatcttggctcactgcaacctccacctcctgggctcaagtgatcctcccacctcaggctcccaagtagctgagactacaggcatgtgccatcacgcccagctaatttttgtatttttttggagtagagatgggattttgctgtgttgcccaggctggtcttgaactcctgggcttaagccatctgtctgcctcaggctcccaaagtgttgggattacaggtgtgagccactgtgcccggcccagccctttttttaagagaaaaacgtatgacatcgttcgatttactgagtgcttatggttttactaaggcagtaaggttttatggataccctatggtaattagatagaattagtgctctgaagtcagctctgtaatatggactcagagtaaacatggcaaagggacacttaaggtctgcattttctctgggaaataaacgtattctttactactctgaatctagtgctgggaaattctaaatccttcttgaggattaaccacttgaagtaaagttttgggtcccaagtaggcttgtgtccctgtctccttctctttacttttcagatgtttcttcctagagactgaggtatattttacttttacagatgaagaaggaagcctcggctgtgtttgtggcttttgtgggtgagcaacatcacttgcaaagataagatgagcatagcaaaactaggctttcaaaataatttttaaaaatttcttagtgattagaaaaggaaaactcttcccttgtctctgttaagaaacgtttttcgacttttttcctttcttaatggatcttttattggcacttctcttccttttgcagaatcttacttaaaagtcactacgttacattacagcaaacagcttagctaatttttatccagatgggccccggttacaggattgtacactattgcgaatttcttacaggaaagtgaacatcaagtaattattccaaatagagttctcttaagaacgtgagttacttaaaaatgtctaaggatgaagtcacttctgaatataacttcactcaagagaacaaataagcaaactgcatttagcataacatggtaaattagctttaactctccttgatgtttgaacatttgtcgctgttaactactgtttcacttttcaaatagtcagggcttagtttgcttctgtaaggataaagggaaaatacgccttcactgagtcataaatatttttgtggctaacttttgcacagagaaaagaggcctctaagaaggtacccagtgaatttttttttcggggcagggagagaatatgtcattttttggtttgttgttgttgttgtcattgttttgctttgttgtttttactctgaactgaactgtatcttgacagcacttttgaattaagagcattactcttattgttctctactacctggacgccacctccctgttgccatagtgttaaggatcatgctccgaggtggggtgaggcagaatggggccaagatcagaaagttacattaagctacatcaggtttatacaagcataaaaccaaatttttggagcagtccccagaatacaacctggtttagccacacctaaaggttgctcttgaatattccttgagaatccacatccctagaatgctgggtttcaatgggccctttatgtacctatcatggtgtcatttctgagcatttctaaatattccttcatgtcttactgacagtttttcttgaataaatcttaggaatattagtgccattatcagtattttgtttggtctgttcacaccacaaataactacccaggtctgctacttgcccctatttctctacctgctaatgaaaatgcttttgaaagtttgagtaacagtattggagtgtgcacagtggtattggtaggttctgtactcatccttaaccacttgttttcatcctttgtgagcttgaagtttctccaaaaaatttatcacaaaacttatcagacatagttaatacactcagagagagaatcactgaaaaagtagatgtagtttaacaaacccagtgccttttttttacccatgaatacatatttgtcaactaaacctcattttgcaacttgttccactactcgaatggtaacaaacttttggtttcccaatagatttggaagatgttgcttttgaaagtaggaaatagatggctttagaagatggaagaatattttgtttgaagtgggagcgtggtatgtccttagctgtctgtgaaatgcagctgaagatgggtgtgggccttcatctgcatttcccatcttcagtttgaggaggtagttacccttctaaccacttaagaactgcatggtacatgctgttttatttacagggcaaaactgtgctcccgtagtttccctggtgcttgccttcacgttaacacagtgtcatcgtttggcagtgtttatgtgccagggtccatgttagaaggaggaaaggtatagcgaagttaaagggtgcagttggcctcccacctttagttttgtaagtgcctttaaagtttgatttttgtaggttgatcataaggaagtgataagtatgttaggttatttgtggtttgagctaattttagtctctttttacagcttgctttgtatcctttgccattaaaacatgctttctagaaagacaacttttgaatgtaggacacagtctatattctatacttggctacatttcaaaaaatattttctcagtactttggaagttggacagttggaagcatagtgacagtatttaaaaatctttgattccggccgggcatggtggctcacgcctgtaatcccagcactttgggaggccgaggtgggtggatcacttgaggtccggagttcaggaccagcctgaccaacatggtgaaaccctgtctctactaaaaatacaaaattagccgagcgtggtggtacatgcctgtaatcccagctactcaggaggctgaggcaggagaatcgcttgaatctgggaggcggaggttgcattgagccgagatcataccattgcactacagcctgggggacaagagtgaaactctgtctcaaaaaaaaaaaaaaaattaagtgatttctttgctttgtgacacttctacttttccagcaagtaaattatattctttcatacaggtatgaaattcttgttccaagctagtggttaaaaaggcacagttgatattagaggatttgtaaaagattatgaccacgcctgcaatgtactgaagcaaggctttgctgggctgtgtataggaaaccttccccagcctgtgcccttgcttgatagaacattttgctcctaagggtaggtgcctgtatctgtctccagtactggttagtttcacacagaacagttgtgtttcagagctttagtctcaagctgccctgctcccctgaagcagccaccctgagcatgtgcactcacaggaggggacatgtgaggtcatggaagaagacgactcaggaagaagaagacttgggtttgggttctgactctgcctttgactgttgtgggattttgaggagttgcatacaggatctgtaaaatgtagtcattagactagactagacagccatatagcattacctagatgtaactttctacaaagacatggtcacaggagaagaccagagggtggggtgatctttctggaaaaattggggcttcatgccttactcatgctagatatggtagcattatatggctgtgcctgatccccctaatctaaaagtgggacagaactttaaaatttcatattaactcaaattaaaacttgaaaaaaacccattatttccttaaaaataataaaatgccctgtgggggcataagtcacattatattttaaaattcctgaatgccacatggatgaatgtagttccttttgaaattcttcttttgtctaaagaggaatgttggattttgtaattggactaaaaaatcttccatttgagagagaaacagtctgctgcatgttctacccttgttcaggataaaacccactaatagctaacatttattgaattctgtgttgtgcctcaggcactgtgcaaagtcctttacatgcaatgctgtttattatatactgtcaattggtctataacagcaggaaatgtttcaggaggacaatgaggtcccagaccctcagtcttctcctgtgtcctggattcagcttcacaatagcactatggcagtgtggccactgcttcagcttccacatacatggctgtgaagagagacaggggattgtgctaagcctccccgatttattaggacataggaggagagagtttgtagtttttgacctttgcctagttttctaacctctttcctagatgtcacaaattggccacccacagtcatattttgcttgcttcacgcaatgctttttaaaaaagagaagagtttaatttgtgccattgtttataaatgaatcaggagaaatgacatgcaactctggattctggcctctcttgaaaaatctgaaaatcacaccgtctgagcttacactggcagtggtctgctggactgagggacacaactccttttggatgtacatgtgtgcgttgcagagtttaccacagtcccacagtgggtcacactgtccttgtcggtgtacactacctagcacttgagtttgcaacccctaccccaagctgagttttctcgtcaagcttgatgttaatgttatgtgatgcttggccttgtaggtatttggtatattatcgttagataaaattgaagcaaagggctaaagggttggtggcctgagggagtgcccttgacagtaaagtctaggataaaatcattggccaggtactccttcccttcccgcccttcctcttttctctttatcctcagcctccttctgctattttgaggaagttagaagccaccaccattttttcccacctcaggcaactgagtgtggctgtatttctgtcccatgttcagttatttccaggaactatttttgatgaccaacttgaagttacattgggtgggcctaatgggggctgataaaagaatgaggtgaccaaatatgcttgcactgagacggctacgaagtaaggtttttaatgacttgctttgtgacttggtcaggagtgataccatttgtcatgtgtccaacttcatgactaaatggttgctctaccttatcctcatagctataataaaataaaataaatacatacattgcagggaggaatgtatcttgttaaaggtctctcccttttagcaacaaaagtacatattatgttgtagaacatgctttttctttgatccttcttgaacacctattactctatagaggtatgttgtgtatggcaaattagaacaagcaatagataaggatgattctttaccattataacccagtcaaggtctttgtcctaagttttgtacctttctccagagggaaaggtatttgtatttatttatttatttttgaggcagagttttgctcttgttgcccaggctggggtgcaatggcacgatctcagctcactgtaacatccgcctcccgagttcaagtgattctcctgcctcagcctcccgagtagctgggattacaggtgcctgccacgatgcccggctaatttttttttttttttttgtatttttagtagagatggggtttcatcatgttggccaggctggtcttgaactcctgacctcaggtgatccatccacctcggcctcccaaagtgttgggattacaggcatcagccactgcctccggccaggtatttgtatttttagtctctatgccttaccgtctcagatcaggaggatttggtgatttatcgaatgtgggggaaggggaagaagaggaaacgggaggaatgttccagattagggaaatagctagatggaagatgcagcccctcatcaaggtggggacacaggaaaaggaacgtgtgcaaagaagatggtgatctggttgtgaccatgttgttagaggacgtccagggaagcatctggtaggtggtggggtgtttaaatatagaacattcggagaatgctccgaagcttcagagaacccttcccaaaaggacaaaaccagctcagtgttttagcactccgggatcatatggcatgacagcatggctgctttatacttttttgtgtatgtgaaattaaaaccaaccactcaggaccaatttctctgaagctttttgtcaatctttcatttgcttttctcgtctagattgtaagctccttgcagccagtgtctgttgattcagtcattcaaaaaataatacatgaacagctactaggtaccaggctctgtgctgggcagttgggatatgtggtgaggaagacaaacttggtccctgcccttaggaagttcagtagtccagcagacaaagtggctgaataaagataatctcagttcacagtgataagagctcttacaggcctaggctccaggtgctgtggggatgctcaggaaaaggtatctaattgggattgggagcaggcaaaacaaataaaggatagtgtataaaggtaatatctagttgaagttctgaagggcaaggaggagtgagcctgtatattctctgagtctctccctaatctgggattgacttcttgtccgtctctgttcatattaagtgtcacctaggcttgaaagggtgagatcatatttcacttccttcctctttggtcttaacctttctctgctaccccctcacacaatgcatatgcattattctcttattgtatatatttttcctctcttccttttcatgtttcctctgccattacttttaacctcgactgccatatggcctctaaacgcttccagaagggtagcctagtggaggttattccatcatggccttgagctcatgcgaccagatagtgaaggcatctgtgtaggtgtcttctccaggagggtgatatttgtttcattgtaaattttgtagccctagaacaccaacaacagtgcacagtaattagtaggcaggcagtacaggattcattgaagtgaagtgataacttttatccaagtatgtatgcagataatctttgatttgtacaaaaaaaattatattttaatatgtaaagattttttaaaagaatcttcaagttttagccttcccactaggaatatattgaaaacatgtgcctagttcactgacttgcagctgccactatgagaataaaggtctcatttagttgttgtgaattttaagggatattttcaatgatgttggctggtttatcccattatgtggtctttttttttttttttttttttttttgaggtggagtctcgctctgtcacccaggctggagtgcagtggcgcaatctcgactcactgcaacctccgcctcccgggttcaagcgattctgctgtctcagcctcctaagtagctgggattacaggcgcctgccactacgcccagctaatttttggtatttttggtagagaagggtttcaccatgttggtcaggctggtctcgaactcctgacctcatgatccactcacttcagcctcccaaagtgctgggattacaggcgtgagccaccatgcccagcctatgtgctcttattagcaattctcagtacacagatagctttgagtgattctttcaagtcaagtaccttattaaaaaactcaagtgtactgataattatcttacttttaaatggctaagtgataagactgaatttttaggtactgtaacacttcagattacagattctgatatttttatggttatttatatttatttatttttgagatggagttttgctcttgctgcctaggctggagtgcaatggcacgatctcggctcactgcaacctccgcctcccaggttcaagcgattctcctgcctcagcctcctgagtagctgggattacagtcacccgccactacagccggctaatttttgttatttttaatagagacaatgtttcaccatgttggccagggtggtctcgcacttctgacctctggcgatccgcccgcctcggcctcccaaagtgctgggattacaggcgtgagccaccgcacctggcctggttacttaaatttaaatacaaaaattatgttgattaattctgaatgatttcctgattgctccccgtttaccattcacacatttattaaattcttcgcttgccatatagaagcagtctctctgccatatatgccatatagataacagaactagctgtctgcaaaccactgaaattgtgaaaacatctccccttttttcctgtttctaattctagctatgaggattatatacagaagtagtcctggatttgatttttttttttttttgatgattgttttttgatagttgttgactacaaatcatttaaacgtctgaaaggggaaaggttttccttaaaaatggatgacaaaggagaataaaaaggtattttgactatttttttgaatgatgagttttttttttctctttcttgttttcttttggagtcatttatgtgtcactgagtggataccatggaacatgtggcagaagtagatatatggggtaaaagaaccatagttcataagctccttgacagaatcactgaagtgtagccgttatatggccactgtcgcagggggaggcagcagttttgaagaaggggatgagtaataatgagtgataaaaaggcatcctggatagaagaccaaactctgcagaagaccccagtttgattatgcttttgttttctgatttgcggaggagagtgaaaatgcctgaggggtgcgggggagcacatagggtgtatgtgtgtgtgtgtgcgcgtgcagattctctctttcactgtatgtatttgtatgcatgtatgtatcttaggacttaagctttctagtcaataaattgccatagtggggaattgcttaattgcttgccttctgttgttgtatttaatttaattttatttttaatgatttttttggtggggtacagggtcttaactatgttgtccaggctggtcttgaactcctaaactcaagtgatcctcccgcctcgggctcccaaaatgctgggattacaggtgtgagccaccatgcccagcttagttgtattttaaatgggcctgtttgcagcattccctactccccttagtttacctggctcacaacctgtctttccatatcaaggcttctgtcacccctggcccatgtcagtgcatttgggcagcccacccagcatcatcacctcatgtcccagggaacttcctgttcctctcttccagctatttccttccctggcagttgagatagtctctacctttgacctactgttaagctcagaccttctgctctctagttacagcctctgtgctgccagattccctcgctcagttgctttctctagtttgggttttctcctttattcagatttccagctgtttctctcctccccccaccgcagcctcctcacttccctccttatgcatctgagactgtggtcagtcactttagatgctgcctctccactgtacttgtgtccatcttcttacctaccacctctagccctggagcaggctcttcccctgtctttgtcttcctgggcccaggctcctaagcgctgctggaaaaaaaatcccccagtattgagcccctagaaatccagtctttaatcccaaatctgtctcccccagcatctggccatcagatctaaagcttacctgccatcctttccacctcatttctctcacaggggaaaaggagcctttgctcctagagtctgcgctcctgaccccttcccatctcacctgttcaaggcatcttgcaataaggggttggtgactctcgaggaatggatcccaggccctccctattatcatcttatgtatgccagttcaacgttctcagcttcctccagccgagacggcccctccagccactgctttatactctccttctctggttgaaatttttgaagtaaataggtcactctgcccatcgttcatcttccagtcactctgtgtgtttatcttccagggaagtgaggctctatgctaccaagccactgaaataatttttttttttttccagactgagtcttgctctgtcacccaggctggagtgcagtgccgcagtcttggctcactgcaacctctgcctcccggcttcaggcgattctcctgccccagcctcctgagtagctgggattacaggtgcctgtcatcacgcctggctaattttttgtatttttggtagagatggggcttcaccatgttggccaggcttgttggcatgttgaccatgttggccaggctagcctcaagtgatccacccgtcagcctcccaaagtgctgagattacaggtgtgagccaccgcacctggcctgaaataattcttgacaagatctgcttccttgttactaatacagtggatattttgcatcctaattttaatgcagttcagtgtggtagacctgtatttgcatattgaatattcccttccctgttttaataactctattttttccttttcttttatatctcctgcttctctagctagtcctagaccttactcatcggtgtcttctctgtttgttcctcaacttgaggagttcctacagggtttacccaatctgctgctttcatttagcccttttgttctttttgagccatctcattcactcacccaggatgtagcatcggcccttgaattcagtgtgcacacatacactgtgcactatgggacagccttcagaggcactttgttcctgaaattgtggtggtctttgcctctcatggagccttgcatatgctgtttcctctgcctggaatatcctaccttttacttaactgattctcgttcttctttccagtcacattttgtacatttcttctgggaagctttctctgatttcccctttccacaggtccaagttaactgccttgtctaggtcctcccatggccctctgaaggcctcctttcatagcaccatgtctgagtatactgtaataacacgcattgctctgtaatagcctgtttacttacctattgccaagtaatctatcaagtcttataaagggcggggctgcttttgttctagtcatttgtatctcttagtacccaatatagtgtttggcatatagaaaatacccaacaaggccagtcgcagtggctcatacctgtaatccgagcactttggtaggctgaggtgggcggatcacttgaggtcaggagtttgagaccagcctggccaacatggtgaaaccctgtctctactaaaaatacaaaaattagccaggcgtggtggcgggtgcctgtagtcccagctacttgggaggctgaggcaggagaatcacttgaactggggaggtggaggttgcagtgagctgagatcactccactgcactccagcctgggtgacagagtgagactccatcttaaaaaaaaaaaagactccatcttaaaaaaaaaaaaaaagaaaaaagaaagaaaatacccaataagtagttcctgaatgaatagatgagaatgctgtttagaaggttcatgaattggaaaccgtgattgctagggaggctttgagttgatggtattgtgttgaaccatgtgttacccaggatcaatttagattttacactttgttttctctgttcctttttatagtaattttctgtatgtggtgttttccccccatgagattgtataccatttctcagcgagaactgtgtgtaatgcttggtggctccctcatggtgccttgcatggaattggacttcgtttcagtggatctgatcccagttatgttaatgctcgatggagctaagtcttatctcgaagcagtccatgtcttcatcagctggccctgcctccatgccctgcacagaccatgccactctggagaggtagtttccctgtggcttattagtcttatgttccagtgtgctggccaagtatgagagacatcagtggtatgagagagtctctctcattcaaacttcgtaggttttgtagctgggactgaccagtgctgacaggaaatagaggcatttattaaaagccagagatttttcaagttgcaggaagcaaagctcttgttagctatgattttgtggtgggtttggtagtccaatataaaagtaaaaactggatgacaatgggaggagcatgcttgggtctccaaagttagatcatttttcctaagtaatttgtctttaaacttttactggtttggaatttcctgagattttgatcttgccagaaagtttatagcaaaagttctgagcagatgacacttttgcgtctgaaaccaaatcattgtttttgtttttaacttttttcttaatatattatccttagttcagccctgaagattattctgttatttgtggatctcaactttccccccatctcctggatctttgtgaaatgaatggtattaattgaatagagaaggaagatataaacataaacttagtcaaaaacttgttcttgactaggcaagttgggctttatagctttgagctgatgacatgtctattcttgtgaaaaagggatttttagtgttggtttggcttcttgttatatttgatttattattattatcattatcattatttttgagacagagtcttgctctgtcgcccaggctggagtgcagtggctcaatctcggctcagtgcaacctccgcctcccaggttcaagcgattctcgtgcctcagcctctggagtagctgggattacaggcgggtgccactacacctggctaatatttgtatttttagtagagacaggtttcaccatgttggctaggctggtcttgaactcctgacctcaggtgatccacctgccttggcctcccaaagtgctgggattacaggccttagccactgtgcctggctgattttttttttttttttttttttaggtttgttttaactggaactttacgtgaatgtaattgaatttagaataaaagcacttaatttcacagtgtgcagtgaactttctgttacttattttaacagtaaaaccccttgcagtaaatgacttggagcaaagattgcttttttaaaaaatgttttaatttgtttttcttttcttgagatggagtcttgctctgtcaccaggctggagtatggtggcgcgatcttggctcactgcagcctccccgcctcctaggttcaagcgaatctcctgcctcagcctcctgagtagctgggactacaggcacatgccaccatgcccagctaatttttgtatttttagtagagacagggtttcaccatgttggtcaggatggtcttgatctcttgaccccgtgatccaccctcctcggcctcccaaagtgctgggattacaactgctgggattacaagtgctgggattacaagcgtgagccaccacgcctggccaattttttttttttttttctttttgagacagagtttcactctgtcacccaggctggagtgcagtgtcacagtcaaaactcactggcagccttaacctcctgggctcgaatgatcctcctgcctcagcctcccaagtaactgagactacaggcatgtaccactgtgcccagctaattgtttttttattttttattttttgtagggacagggtctcgctattttgcccaggctagtctacaactcttgggctcaagcagtcctcctgccttgacctcccaaaatgttgggattacagggacaagccactgcacctggccaaggattgttttttaagtgaactgagacccagccttattagtggtcccagagcagacctgggacctgaagggaacccttttcttctggtccagcgtctttcctctgatgggctactttcctggagcctttgattgcctgtcatcagagtaactgagtttgaacagagtaggtagttcctctccagaccaccacactcaccagctttcattctgcttctctcgtttagactgtggttctgaatcctcagttctatttactgagtgtttttaaacataaaaatgccttttaatgagattgaaggccagaggtgggacagttgaggacaaagtagaaataaaaccttcaaggcggggttgttggtgggagtctttttttgtttgtttgttttttgagactgagtctcgctctgtcacccaggctggagtgcagtggcacaatctcagctcactgcaacctccgcctcccgagttcaagctattctcctgcctcagcctccttagtagctgggatttcaggctcccgccaccatgcccagctaatttttgtatttttggtagaaacggggtttcaccatgttggccaggctggtctcaaactcctgacctcaggtgatctgtctgcctcagcctcccaaagtgctgggattacaggcgtgagccactgtgcctggcagggagtcttatagaagctgtcgtggacaatgtgggaagtagtgagcctttgtattccagtatgctgggctccactgtgcttgctctggcccccggtcgctctctgtgtgttattgagtccccatccacggccatactcttcgtcctgcttctctccttaccatcctctccccgctagtggtaccacggctaccactagcaattactgacatgtgggatcttagggctacttccctataaggctgcagggcatgtggtgttggctacgcgcatggtaaccatggtagccctgtggttctccacatgtgcgccttgtgacctgggattggctgcagactagtaataaactgcgtcttctggtatggaatctgtctgtagttgtactttctacctctgtatttaaggggagatctgtaacctaccaatgccagttgaagaggatggatgatagagatgttaacaaacagctgaaaaactaactacaatggcctgcaaaatagaacagcaggtttttgtggcaaaactttgtgtccatgagtttgttttttaaatatcctcatataatctgttttaaatcgagaggctttgggtaaaagccatggctagtcttacatgtcatggagtacctagcttgtgaggttcacagtttattatttacagagtgtccccttaaatcttctttgggtcggttcagcgaatgttgctcagatggacttttttggctgacatagagtcaaaatggtaatcaagcatgaaagtacagacagtccttaacgcacaaatgtgtcatgcttgaaaagttggaaagttggttctctggagctctgattgtattgtcctgtagaatccgtgttgtgaatggtggttaaatcccaaatgagtccgtagaacctatataatctgcaatatacctgcagtattccaattaatatgtaattcccccatagaactatgttaatgatttgtatgtatggtatttaatattatacataataatgattgtatgaataaaaaacattctgggctccatgtggatgatggggtgtgtgtgtgtgtctgtctatgtgtgggtgggtgtgtgttcatagatcccttttcctgcaatcctggcactggaattggttttatcatttccaattaagtttcattcccatgaattttggagtacagactgggtccaggtatgcagggcatagattagagccctgagaaataggattaggctggaattgctgggttggagatcagtagcttccaggaacactttttgggcctggctgtcttcattatccccttttgttttctcctggggtctgcaggtattgccctgttttgttcctctaatatcactttttttttttttctgcttttgaccagggtttttgcctctggtctacaactgaatatcctatcagactctcctgattttgaaataaatatatagtttttttgaggtgttctagcgaatttctaaatctaaatgttgtggcagagttattacatactaattttgctatgagaggttgtagaatcccagatgactaatcttgtaaaccatacacgcatttccatctaattctccattgtatatcatgttgcagaaaataacagcctctagagtttacattgcctcctttgactatatttcttatttaagattagttttcagataagaccttttcatggcagtacataactgtacagagggcttccaacttgtcttgggagctctcatctctgggagacatcacattacccactgccccctgccccccgcccccagcctggatgcactcagcctgtaccccatttctgtcctcagccaaacactgctgaaatgcaagagctttcaattgctagccagtgaagatgcagactaagggatttccatgtagaagcccgctcttttcagctggctcgtcgagagctggaggccccttgcttgttcacatgaggctttttgtccctgacttggtggctgctgtttcacttctcagcagaaagggacacccttgcccccccccagaaaggaagatttgatgtaccacttccgaaaggttcagtcgggcatcactgtaaccaagaagataggtcaggtgaggctggaggtggaacagggctgctcgctagaactccagattgttccacaagtgccttctggcagagaatgatggaagcttccgtgatttttttttctccttaatagttatgagcacagaagaggagcagattgtctggctatagaagctgtcttattttttatttttgtttttgagatggagtctttctctcttgcccaggctaaagtgcaatggcgcgatctcggctcactgcaacctccgcctcccgagttcaagcgattctcctgcctcagcctcctgagtagctgggaattacaggcatgcgccaccatgccagactgatttttgtattagagacagggtttcaccatgttggtcagtctggtttcgaactcctgacctcaagatctgcccacctcagcctcccaaagtgttgggattacaggtgttagccactgcacccggccgaagctgtcatattaaatagcactttctgcttttagcaaatttaatccaaatgagactttagattttcttgctctgacttaccagcagttccttgaaacacatttaattatttttgccagaaaatcactcaagcacttacgccatttttttaccgtgaaaatatgctgcattattttaaaatatattagaagtcagtaaccataagattttatatgttttctaatgtattctgtaagctttctgctgcttttgtttggaaggtgtattttgtaacgtagaggactgctttatctgcttgtaagcttgatttttgtttttactgtaatttttttttcttttgctgtattgagaaatacattgagtaattataaagtcagtggcatgtttataagttaatatttgtatctattccttagttactctaactcaaaacctaaagtaatcttcaactctaatttactctgacatccagttgactgccaagtcctccaacttaatccttatccttttttttttaaagagatgcagtcttgctttgtcacccaggctggagtgcagtggtgcaatcatagcttactgtaacctcaaattcctgggctcaaatgatcctcccacgtcagcctctggagtagctggggctacaggctcttgctaccatgcccagctaactttttatttttattttttatagagacagagtctcactgttgctcaggctggccttgaactcctgccttcaggcggaactcctgccttcaggcggtcctcctgcattggcctcccaaagtgctggaattacaggcccaattttattcttgggatgtatgtctgaaactctttccttcacttccttcccaagccttagttcaggcccttctcatctgtggtcttcaaagtcgccttcagctggttcaggtccttcctttctgctgtatctttcatgggaggacatgttatgtatcactgtcctacttgaaaacttccattccccattgatgagggtgttacctccagattcctaacacaggtgctgaaggcatgcctggataaaggcactcccttgatctcctggccaggtccccgtacacctgcagcgcatgctccacattctgtctttactgatgctgtgtcttctgcctgcggagccacccaccattctattcacagcccctgcctcagcggagcacgtgcctccctcttcctacactgagctgtcctttctattgaatcccctcttttttgtagtatgggaaatattttattatgaatactcttttctctgttgcctccgtgaccacgttaactttgccctaattcgccttaggactccatctgcttaggggaaagttaggatttggttacagaaagcaagctgctagaaagaacagtgtttagcttctgacaggcaaaataggattttgcaacatgcttttcctttttaatgcttagacattttatatgaattaatatttttatttggttgcttatacattactttctttttagctagaatgtgaaccctataggaacatggggattgcctttcacatctttgtatcctcagtacctaatgttcagtcaccctgtggtcttgtgtcgtatatacatttagccttccttaattaaaccatatgtactggtccccgtcccccacccccaaatagagagaaagaaattccttgaatactacattgccagtatcaaaccacaccttgatatcctctggggaaagggaggtatcagttgaaaagagaaaagaggttaaaatctaggcattaaaatgtgtaaggcttagatgctggcaatttaaggtatgttttcctgaggttaattttgattgtgtgcaaattttacctcatatctaactgtaggatttagtcaccacataagatgggatacctccataaatccttcagaaatgtttgtgaaattaaataaagccttattgaagactcagctcttgagagtcatctacctacctaacagttattcttgaacagaagagtcttacttttccctataaggcagtgtgatagccatctgtatattcatataatttatgttggcgcttacttcatttaaaaatgtattccgtgaatgcagttgccaggcggtgtgctgatcagaaacgtgtaccaatggcctcttttataattataagaggaagaccaacctgaaacagtcacacaaatgattaattttaattgtggaggagtgctgggaaagaaaaataaaagatgcaatgcaagtgtttacaaaggagctttgagcttgtttgaagtggtccttgggcacttaagcaaggcttaaagaatgatgtgattagaagtggcttagcaattctaaagaacacagggaaggcgtgtggccagaacattggtccctagagcacatcgcctcctgacataccatttccttaagttaatgttttaccactatacataggccctcccctttgtttacccagatttttttaattttaaggatgtttttaataacttagaatcctgtaatttgttgaacagtcctgtattccctttacttatattccttgagattttataaaatattttttacatgtcccaagtcttgattatatctttttacctcttgttaagaaatacttacttttctatttttatgctatatttcatgtttactgtagaaaacaaaaaaagtaaaatttttctttattcctatcactgcagcttataagcactctaaacattttgatctatattttgccaatcatatattttagttaaaattgttgttgacataattgtagattcctgtgcagttgaaagaaataatacagagctgagcgcggtggctcacgcctgtaatcccagcactttgggaggccgaggcaggcagatcatgaggtcaggagtttgagaccagactggccaacatggcgaaaccctgtctctactaaaaatacaaaaattagctgggtgtggtggcgggcacctgtaatcccagctagttgggaggctgaggcaggagaatcgtttgaactccggaggcagaggttgcagtgagccgagatggtaccattccactccagcctgggcaacaagagcaagactgcatctcaaaaataataataataataataaataaactttaaaaataaaacagagagatcccatgtgcgctttgcctagttcccccatccactgcccataacattttgcagaactgcagtacagtatcacaaccacaatactgacattgatacagtctgctcatcttattcatatttccccagtgttactcgtatccacgtgtgtatgcattgtgttttcaatactcttttattataaagctgtttttaatgtgattcaattctaggttgttttgttctgccctcaaaaagcattccctctcctaatcatatctccgtcatacccttgtatgttttctttaaacctgttttaagaaagcagctacctgtaagagaaatgagattgaaaacagaattgccaatctgcttgtactttataagcctgttgattgtttagatacggtttagccagtttatagttaccctgggtgctgaaaggtatgctggatgatacctaaccaacagagaaccattgaatgccgttcaaaatggactgaagcatcagcaatgtctgaaaaaggcctgacagtaatgtacatgtcaaatggcccgtaatttaagcagagtagagtaagtagaagaataaacatggggaaagttccagcaacagaggaggctttgagcttttgctcttcatcttgagtggatgttgttctcaggtggtaataggccatcgagctttctccactggctgcctctctggggaacaaataaccgaaaagatactcagcaccctggttggtacataggtggtcagttgatttatacttcctggttttcagtgttgcttgaattttctaaatggaaacacagtacctttataatcagaaaacaatcccgagttttgatttgagggtgttgtaaaaagttaaaaaaaaaaaaacagaaatgtgaaaaggaagttgtgttagagtatttggagttgagaaagcatgaaaaggacagaagagaagctggttgtcaggttgcatggggtagctacaagcacactgaccagaaagtcagctggaaaaaaaatgtagaaacaggagataaaacggccaaggggctatacaagcaaacagcaaggacctgagaagaaaaactagttaggtgtgactgtcagagtgatgtgtacagtgtgatcctttctgtgtaaaaacaagcagtaagaattcgctgtttacgtttgcgtgtgtttggagaagagtggggaagagtaggcactgccagactgtgaacactggttaggttattgttatatctttgtattatatacactggacatgttatttgtataatatgagaagaaattttataaatcattaaatcttttggcatttaggaacatttgtgttttctaatagttgcttctatactattatctttattatatgcccttcatcttctcagtgtttggctgttgttgtgattcccttttgtgagcagtgttgaagttagctaatattcatttcttctcccttctttcaccctcctccagagtctgatttgaagtattcctagctgctacctataaaagcaataagcaagattgttttacttttcacaaactcgtcctgttctgtgcctctgcctcggacatagctgtagtatagagtgttgtctcccttacatccttctatcttagacctactagtaaatattaatgctcactctaagttcttctcaattcttttttttttttttttttttttttttgagaaagagtttcgctcttgttgcccaggctggagtgcaacggcacgatttcggctcaccgcaacctccaccttctgggtttaagcgactctcctgcctcagcctcctgagtagctgggattacagtcacgtgccaccacccctggcaaattttgtatttttagtagagacaaggtttcttccatgttggccaggctggtctcaaactcccgacctcaggtgatccacctgcctcagccttccaaagtgctgggattccaggcgtgagccaccgcgcccagcctcttctctcaattcttcctgaagctctttctgcactagattcctcaggaagggcttgtgggaacaatcttctgtgaatcaacagtacatattcataatagtttgtcagcagcctattattttaaggccatttggtctgtatataaaaatgtttggatcacattttctttctttaaggtaaatatgttattctgttgtcttctggtataaagcattgctgtaaatgtttgacagtctaattatcttttgcttataagtgacttagggttttttgtctatgtgcccaaaggattttttccctctttctctctttttttttttttttttttttttttaaacagacaggatctcaccctgttgcccaggctttagtgcagtgaggcagtcagagcttactgaagttttgaactcctgggcttgaggaacaaaggatttttttaaccttttaattcaaagtctcatcatttatgcaaccatgtcttggtgttggctgttttgggttgttctccctcaaaaatccatgtgctctttcaatatgtagttttaaatcttttttttttaatttcaggaaaatcttgaattagagttttccgtttttcgtctggtacattgcttgggtttccttcttcaggaactcagcctgttatgtgtatgtttgatcttctttgcctgtcgtctgtttctttcacttcctctcacttttttaaacttcatttattaaaaaaaaatttttttttcgagacagagtttcgctcttgttgcccaggctggagtgcaatggcgtgatctcggctcactgcaacctccgcctcccaggttcaagtgattctcctgcctcagtctcccaagtagctgggattacaggcatgcgccaccacgcccagctaattttttgtatttttagtagagacagggtttctccatgttggtcaggctggtcttgaactcctgacctcgtgatctgcccgcctcagcctcccaaagtgctgggattacaggcgtgagccactgtgcccagccttattaaaaattttaaaaacatacatttaaacttaacagaaaaattatgagagagaagggggtggtgccaggcttttttaaacaaccagctcttacatgaactcatagagtgataactcattaccatgaggacggcatcaagccgttcatgaaggatctggccccgtgacccagacacctcctactaggtccatttttaacattggggatcacatttcaacgtgagatttggagggggcaaaactacaaaccatgtcactcagggattggaggagcaagtaccacctatactttggactcaggtagaaaggcaaaatatccaggaaataagctgctaccgtccagggttcagcagaggtgcccatcagcctgccaagtactcaagagtccagcctctagggagctaatcatcatggtgagctcttcgaggcacagggagctgggaagacagtgcttgccacccctgcctgaatagtgtttgcacagagagttctgttgtgtcttgattgggtcctcctgccactgggaatgctgtggattatactaggtctctatctggcttgtttcagggctccatgtgaaaaccttcttgatatcctagccatccacctgctcagtccctagtttgcaaggaggctgtggggagcctagattctgtgtcagatagaatgtactacattccgtctcaggaatgtaccacatcagaaaacagtgcgacctgcaggagaagtagaggtgaagaggcacattcttccgagaaatgtttctctcaacacccagcattccctggatatcagcaggaaattactcactgctagaaaatgccccatgagccttctgttaaggaggtcaagggagagaacagagaaagttctcaaagttgacttggtcactggtactttcttatgcggttcttattttgtttgccatcgtcatcatcatgctatgtctattttctcaatccaaatccactgctttcaccttggttctttctgaccggtttggcacactcattcagtaaatccttatggagagcccaatgtctgcataattgtgctgtgctgatgaccaagctagacctacgagtgtcggctcctttgagatgtacgggacagctcttctgtcatctcttctgggaagcctctccaggcttggtgaacagtggcaagatgtttaacagttgtacatgtgtcccatgttcctttctaagagcctgggcaaaccagacccggtcgcaggtcatcgtagtatggcgtgagcttcctctctcctttctgaccttttgtgtgatggcaagaacctgcagagtgacacaagcagcaggcttctgaggttgctctagcctcagaatggccgtcccttctccaccctggccctcattgctgaggtttcctttgaagcaacagtgccggaacagactaggggaagcagcttggacatagctgtatgatttattaccacccattgaggccaaccaaagtcggcaaggagaggtagcaggtcagtggtgcctggaagcttcctctttcctttgcaccagatgtgactgctctgcaattactcctaaatttgctactctcgtttttactagccaaccttgatgtttttcccttcttcctgtagaatagacttcccctctgatcagtactttctactcaacactatttgtggccacagtgggaactcattgaggacagggaccatgacattactacctgacccatcaacacttggcataacttgaaatgcaaggacaaaaattggctgcaagtacaatgtggtcttcactctgaaggtgatccttaaaacttggctttggcatcatattgccttaatatacctaggggattgggtaaaaccagttactttaaaagagttttacaattctggccttctagctatcttgtcttcttaaacaagagcacaagatgaatgtatcttagtgaaattttatatggtttgctttgagtaatcttgcgaagattgatttttagcacagtaggaaagacacattctaatagtgatttttttccccgagtttatgtactgctgttgcatgaaaatctgactagatttaatgttcctaaagttctttgttcatcctgatttttgcaggtcctagggaaagctttgttttcctcttaacctaacttagatgttgtcatttcatgagctttggaggaagagtgtatagccaattgtgtaatgtctttaaaggatattatctctgcaatagttgtttataaggcctaagttattcatgtaataatagtggccccggatctgtttctagcaataggtatatggattttggttcctatatagttgtagttgtggctttgagatattgagcaagcccttttaagaaaggatttggcatccctcagccttcaaaagcttctcaaaattgatcatatgttattagcaaaggtttactgcctgcttccattgtatagacaatttattttttatgtattccgttctaagaaggcagatgaccaaaagatcttgcatctgttgcccaaggcttgtgactagagaggaaagagataagaatacttttttaaaatcccattttactaaatatgttgaggaagtggtaagatatattaatttgttgagatttttctgttatgcctattatatgaaataggtactctgaacatggcttcttaattaaatatatttgataaaatacaacttgcttcccctggagtttagaagtcagataactgccatggagagctatgctttctttgttttaaagatctgcttatgaacatgataaacaggaacaatttaatgttttcaatattttcttgtattttactgcaagtttatacacaacataaatatgggggaagggggaaatgtttataccagagccatcctgcccattctttccttacagaaggacaaaggagcagtatttattttaactacaaaaatactattgtaggttttaaaaattccgtatattttgatatcttgtgttcctcttgacctttaatttgctaaatagttgcaaagaatgaaggtaacctgcatcatcttcttaaaaaccaactctatctaattataatagtttgtctatctctgaaaaatagtgatgtgttcattctgaaatcagaactaccggatgcagctgcattttgttactatttgaatttcgggagagggaggaggatgcagcctttcgagctgctgaaatacacaaacacaaagaagacaccaagcatagtagaactgtgttaagctgaccaagccagaagaagcacctattctcagcatagtatgagacgtaaaggcaatataatgggcatagttgaagatggtagaaggaaaatagactctgatggtttaatgttaaatgctttttttaaaaaagtggtattccaatatcgaagaagaagactttctacttttagaagcaataaaggaaattgcagaggaaagggtcaataggttggaatacataaaaattaaaaacttttaaactttttttttttgagacagagtctcactctgtcacccaggctggagtgcaatggtgcaatctcggctcgctacaacctccgcttcctgagttcaagcaattctcctgcctcagcctcccgagtagctgggattacaggcatgggccaccactcctggctaatatttgtatttttagtagagacagggtttcaccatgttgtccaggctgatctcaaactcctgacctcgtgatccgcctgcctcggcctcccaaagtgctgggattacaggcatgagccaccgcgcctggactaaattgtttcagtattaattttttttaaaacaagatcttactgttgcccaggctgaagtacagtggcccaatcatggctaactgcagccttgacttctgggcctcaagggatcctcccacctcagcgtcccgagtagctgggaccacagacatgtaccaccacacccagctacttgttttatttttatttttgtagagatgaggtttcaccatgttgcccaggctggtctcgaactcctgggcccaagcaatcctcctcccttggcctcccaaagtgctggtattacaggtgtaagccattgcgccctgcctgattttttaaatgtgcaaacagataagttggaaaagtgatttccaataaagataaagagttgatggttttaaaatacgtaaagagcttatatgaatgagaaaaacactaacattccaaaagattagaaggcaaaggacagaaagaaacaaatcactatgtctgggaagggacatgaaggagcaggttcccactgggccagcggggctcaaacccactggggacgtccgagagactgcaagggccatgccttcacattgccgtacctgagaagcaaggagctggggtatttatctctttcacactttgggaggctgaggtgggcggatcacctgaggtcaggagttcgagactagcctggccaacacagtgaaaccccgtctctactaaaactagaaataattagctgggtgtggtggcacacacctgtaatcccagctacttggaaggctgaggcatgagaattgcttgagcccaggaggtagaggctgcagtgagcataaattgcaccactgcactccagcctgggtgaaactctgtctcaaaaagtaataataatcatgataaataaaataacattagattgttagcagaagtagccacaggtttctcccacctctctgcaagttgctgagtgtgattcccatcaagaggtacaatgtctttttatttttattttatttattttatttatattgcctatgttgtctaggctggttccaaactcctgagctcaagtgatccttctacgtcagccccccaaagtgttgggattacaggcatcagccactgcacctggcccagatactttttcttgagtaggaatttcgagtcaccctgaacattgcatgccttcgtagtggggaagacaataggaaaccacaggctgtaggctaaaatgggttgtgtttcttgtaacgtcatgacaaggcataacccatcttggcatagtaaatagtaagcactcactgaactgatgattttaaatctttgctgtttattcagcaatatcctaaattagcgctatgttagtggagttgcatctccctcatggattagtctgaaaaagatgagaaatctgtatgtagaccaagttatccttaaactgctcataatgtatgatgcacgtggttttacgtgtacagcctggtaccattgttcttaggcacatttcagtgccagaactcttaatacccaggaagaagcaaaaagaaagatggaggtgcagctagaggttgtggcctttgaacgattcattctgccttaataagagtggtctggctgagctcggtggctcacacctgtaatcccagcactttgggaggccaaggcaggcagatcgcttgagcccaggagttcaagaccagcccaggcagcatagcgagaccccccctccccccgtctctacaaaaaaatagaaacaatgagccaggcatggtggaacgtagtgcgtggtgcctgtagtctcagctacccagttggctgaggtgggaggatcacctgagccctagaagtcgaggcttcagtgagcccttattgtgccactgcactccactctaggtgacagagcgagacaggtcctgtctcgaaaagaaagaagaagaattaaaaaaagtgattagatcccttgtgtttgggacacttgttggcagcagggatggtagcgtttatgagggttgcatgtaacatcgcctagctcagacatctgtttgactgtcttcccccctgaagcgcaggctctgtgagggcaggtcttttgtctttcttgttaatcttcatatgcttagtgcttgccacatagttgatgctcagtcgatatttggatgaattgaagggattaatgcattgaatctgaaccttgctttcttaatgcatatggggagttctttggaaagccacacagaggagcttggttgcctgcttcctctcttccccagattgtctttttattgttgtggcttcactgaagcactctcacttcaaataattttgggcattggtcgtattttattctttgttccttcttcatccttacccctcagatggtatgtagaaaagtacactacatctagaaagtactttataaactcatttggttgataataatacatatgccttttccttggtcctggtagcagaatcttgtgccactcttggaatacaaacgaaattcttaaccaaagccagtttcattttgatgttctattttcctcccattcacactccaaattgtgcaccaaagtatcatcctagttttgtgaggatggttctccatacttcagggtaggagtatcatgtggattcctatgatacctttctccctgggaccatggagggcagcagctggtgattgatagtctgattcccggtgaggaaagctgtgagccttccacttgcagatgtctgccaactacatgtgtccttagtcaactgtaccactgtcctccggcaaacagcagaagcccagggcctgaagttcttaagctgtcattatggaaagcagaaggtaaacaaaacagaagtgaaagtagatttaattttttagactgttctcttacaggaatggttttgtggttctcagcattttaaaaaaaatagtggttccaatatgttttattgacatcaattactgtaagtctgattcattttctgcctattgatttctacccaaggtgaaattcatgacatttaacagaaagcataagtgattttttaaaagcagacactattagggacggtaaaaataagatttaaagtcgggacacttgaaaaagcaatttttatacctttggtaacgattctattctgattctttgtataaataatataaacaaaggctctagaagcttactataatgaagttggtgtgctgtttctaaattctggtttaaggcccaaattcattttatctgcattaacttttttttttttgagagtctcgctctgtcacccaggctagagtgcaatggtatgatctcggctcactgcaacctctgcctcccgggttcaagcgattctcctgcctcagcctcccgagtagctgggattataggtgtgcgccaccacgcccggctaatttttgtatttttagtagagacggggtttcactatgctggtcaggctggtctcaaactcctgaccttgtgatccgcctgcctcggcctcccaaagtgctgggattacaggcgtgagccactgcacccggccgtgttaaaatttttcagtggtagaccactatgtcaatatgttgctttcactgacaacagtattttcttaaagataggataccccatttctagatgaatctcattctagctggaaaataatttttcagttctgaaactacatcaggcctcagggaatcaaaactagctattagccacacacatataaagtggctttgctttataaacgatttagggtcaccatcaatgacaatggtccctttttattgtatttttaagagtttcttatcttaaatggctgcataactgtagagttttaaaaaaattaagtaaatgaccatgttaatgctctattaagcttccaaacaatattgtaatttactttgaagatttttttttattctcaacatcctgcagcttgaccgtttgcctccgtgtctcagtgctgcttattttgaggtgtggactggagtccatctgtcccccttgcctctgaactgctccgttttgtgtttcgtaattcttcatgctgcatcctgggcgcatttctctgtagtagctttcaatttgctcatgctttgactgggcttagtctagcgtttatcctatctcttaaggttttttaaaaaattttcatgattattcatttatttccaggatttctcatttcttcagtcacatctccttgttctggttttacttcttcctgtttttattcataacatcttttttatacacgattccttcatgtatttctaatcttaagtatatttaattgcttatttgattcttttttttttttattgagacagggtcttactctgccaccaggccggagtgcagtgacatagtcatagctcactgcagcctcaactacttggactcaagcgaccttcccacctcagcctcccaggtagctaggaatacaggtgtgagagccgccacacccagctgatttgtcttactatgttgcccaggctggtcttgaattcctgggctcatgtgatctgcccttcttggcctcctgaagtgctgagattataggtgtgaaccactgcacctggccaagtatgtttatttatttattctaatttgagagggagtctcgctctgtcgtgcccaggctgtagtgcagtggcacaatcccagctcactgcaacctctgcctcctgggttcatgcgattctcttgcctcagcctcctgagtacctggggttacagttgcgtgccaccacacctagctaatttttgtgtttttagtacaggcggggttttaccctgttggccaggctggtcttgaacttgtgacctgaagtgatccgcccgccttggcctcccaaagtgctgggattacaggcatgagccaccacgcttggcccaagtatgtttatttttaaagtccccaacaagctatacaataaattgcatatggaatggatttttgttctagttgatttgttggttatcatttgtagaactaactagttgtcttctgtgtttgataccttgcttctaggtcattttgagttgggagccttttgttttgtttttattctcatgctgtttttgagcctagctgtgcctttatggttttctctaaatttaattgaccattgttttatatttggagcagtgggtgtacatcagagtgtgaaagcagccccaccctctccaccagaaggtctccatgccagtttcacgaagcatttttcatgccctcattcctgcccttatcccttgatttgtggggagtttgtaaagcagttgattgttttttttccacgtagttttccaagtgcacataattgttctgttagtgacttgtagctccattatctattaaccttgccccagaccactgtacaagcggacccaacgcttcctccagctgtggcagggacagttacttggtatcctgctgccttttcaatgctgaccagttttgccccttcctcccctcaacccctgtctttcattcaactatcaccaaaccaaaagattctggtttgctttttagtatgtgttcttattcagtacatagtcattttaaaatttaaaccaaaacagacttggtactgattagcttaattttaagctttttctttattattaaacagtgtagtttatcttagcatttcatattaagtatatgatttatttcatattgcttatatgaatgtacacataaatataataaaaatattttcctaaggtttttgtagtaaattatatcgtttcattaactttcatatatagcattgcttttgacctggaagacattgaacctctgatgatttgtatattcctcggagtatactttgttacatagaaattttctcatttataatgagatttgtgattaacaaaatttgttcaacatgcattactttgaagatctggtttctaaaattttatgctagttaccccacccccccttctatatatatctccctattcagcgactactgcaagagttccaggaaatgtacactgtgtgttcacttactgcattttaaatcattgcctttactatatttctgcatttcccttcaatctagctctgtctgtacatttctgaaagccagtagcttccctgaagaaccaggtaacaacccgaacaatcaaattagataaccatttgtagaatggaggttccgggagatcttagaagatgtgatgggtgctaagggactttgtagttccctgaagttccagtgagtaaaaggtacccttggaattttttattccttcagacttttaaaacagagatcactttcaaaaattactctttctgctttgaatccatgttttagtaactattttgacactgtttggtcagaaggctgtgtgggtcaactgcaaataaataaaataaatgtgatttcagtaatttccattttgtaacaagtaattgagaaaataggattggatcagatatttgcttatacacattccctttcaggagcacttctgttctataaagaatgttggtatattgttaaggacacttcaagctttgggaacctttgaagtatccattgattcagttaacaaaattatgttgagtgcctaccctgggcctgggcctgtgttaggaggggacactaagatgagagtccaaagcacttcttctcagactcctggctgctaatgggttgctgcctctacttcttcacttagcagatagctttaaaatgagtaatgcattttaccatggagcccgtaagagacattcacccagttgtggaccgaggagaagggtgttaaacccagattgtgatgtttcacttgatgaagtgcttaatataaacatggaaatatttccgcaaggataaactggcttttatgcctgtgtgttttcaggagaaatagaaatctctaatcaaatattgccagcttttcacccaagtttgactttttgcctaattgagtttgggaggtgtctgaataatggataatgagctttcctgaataaatataaaaattaattaactccaggctctaattcattctgttaccagagttttgtaagcatgttacccctttgtgttcattgggagatcatctgttaccttcttaaatgagtggggaaggatgggaaatgaggaagagctataaaaactattcaggtgaagaaggtttctgcccctccttgccccttttaaaatctccagctcagcagatgctttgtttaaacttgatcaagtgcttgtgaatcttcctagcctagctaaatcataactttggaaggacttgcttttttctctcatgacaatggtttaccacagaaatgattcagatcactttgtgtgcctgatgcctatgtaaaatgatacagtgaaatggaaaccatttacctgtaagctttgggcacacccaagcctgcttcaggagcacatgatcaggcgtgcactctgggagagccgtacacatttgacatctatgatgtgtggcgttttattctatcacatttctgaaatctacactaagagaaaggaggctcttaaaaaaccactgaggtgtggactgggggaaggagagatccgtaaagaacctgtttgttacctgttgatactatttcccattggtaaaatttctaatttagtgtgatccagccctgaaatgctgaggcacacactgaatgactcctgacatctttagtgtttttgttcaggggactcttctgggaatctgtttcatggcaagtttattattcccttttggtttggctcatcagtttacccagcagtcatcttaatcggttttaaaggcttttattttattttgttttctctgtggaaattttacacattcagtagattagaagtagttatttaatctttggttagcataataaaagatcttctagggacattttttgcttgcagtggaaggctagttaaatgtgttcattagtcatgaatctgctttttctatagctgttggaaacgtagctcccctgtgatacagttgtagaatacagaaatctcgttttgctgttacggtacggtagtctacttactttcttccaaaccattaatgttatagttacctttaattgcgtaggtcctatcacccctcaattttaagactctaagcctggcattttatcttacaaaatgaaatataaagacttgtactcagagtatgtgtgtgttttccatataccattctaaagtagagaaagatgagggattcgccagaaactgatttctaataaattatccagaaactgaccccttctcacctcttctgttactgtcactgtggtttcagccacagcatcctttgctgcattgttaccttagtttcctgactgtatccttccttacaccattgatccctgcaatcccatctgcgcgtagcagccagaagggatccacttactgctgtgatcagaaatcctcagccaggtgcagtggctcatgcctgtaatctcagcactatgggaggctgagactggagaattatttgagcccaggagtttgagaccagcctcaaactgggtaatataatgagacctcatctctacaaacaggaaaaaaaaaattttttttttttttttaactagccaggtatagtgctaatatacctgttctgggatccagcatgctctccctgacctgcagcttcatctccaccactttgcccctcactcccaccacaatggctttcttctcttcctcagacatgccgtgcgtcctcctacctggaatattcccctccaaacattcccatggctcactccctcaccttcatcagatctctgttccagtgtcacttttactggaaggtcttttgtgaccatcctacttattataaaaaaataatctgcccaaccttctccttttatttcctctacttgatttttcaatttagtacttatcagctgacatatattttgtctctctgtctctctctgtctctcatagaaggtaaattctataaaggaaggaatttttatgtttggttctttgctgtagctccaatattcaaaacagtgcctgacacacagtaggccctttatatttgttgaataaatgttgacactctgatatctaatttttgtctggtgactaatacgaaaactatagagtgataataaaagcattaccttagtagactggaaagggatgagcgctaggatgaactttctgcctggcgatcttgctgaatttaggaggcagattggggttcaaaggaggctgaaatggctaggatttgcagagcagggtactaaggatgagcaggctatgacagaaagaactccagaaatctgcaaagggatcaccttgagtctggctggatacagtgtacactttgtagggtgtctcttcatgagcttggataaagaacaactgttggggagtggataattcccagcactcattcaagcttgcatcggccagaacggagagagacagacctctgtaatacgtaggatatttggtagaaacattcaaccgaaaaccatcagatatgcaaaaagtaataataataagtaaacaatgtgatgcatagctagaagaaaaatcagacattagaagcaagcccagaaatgacagatgataaattagcagataaggacattaaaacagctattataaataacttagcagatttaaagaaaaacaacataatgaggataatggaagaaaaacaaccgaataccatttctaaagaagaaaaatacaatatctgaaatgagaatttagctggataggattaatagtttaggcactgcagaagaaaaaaacagcatctatatgagaatatacccaagggaagtacagagaggaaaaaaatgtggattggggggtgcctcagtgacatatggaacaatattaaacaagtctgcccccaaaatacttgaaggaataaggttcaagttttttccaggtttaatgaaaactataagcctacagattcaagcatttcaacaaaccttcagcaaaataaacaaaaccacagtaggcctggcacactgtctcatgcctgcaatcccagcactttgggagcctgagtcaggaggattgcttgagatctgcttgggcaacatagccagaccctgtctctacaaaaaataaaatgaaataaattagctggatgtggaggtccacacctgtaactctagctagcctggaggctaagaagggaggattgcctgagcccagtagttcaaggctggagtgagctaggactgcatcactgcactccagcctaggcaacagcaagaccacatctctctctctctctctctctctctctcaaaaggcagtgaaataacgacttatttggggaaaaaataaaggcagagaatttgttgccagcagactagcataaaaaaaaggaagtccttgaaacagaagagaaatgataaaagatggaaatttggatatatactaaagaatgaggattgctaaaagtgacatacatagataaatatgaaatatatttttattttaaaatttatttaaagcaaaaataaaaatacatcatatttataacatagaaataaaaaatgtatgataatagcataaaggataagtggacaaatgctgttgtcgtatttttggtaaaatgcactattatttgaaagtagaccatcgtgaattcgatgcatattgtaaaccaaatagaacactaaaaaatgaaaataaagagatatggctaatgtgccaatggtggagataagatagatgcaaaaaaagaaaaacattcaaaagaaggcagagacagaggaaaaaaggaccaaagatcaaatgagtcaaatagaaagcagctaaactagcaatatggcagatttaaatctagccatgtcaatagttatattaaatgtaaatgttctaaatacctgaattaaaggatgaagattgtcagattagattgaaaaagcatgacccaactacatgctgtctgtaagaaattagaaaaagaacaaattaaatccaaagtaagaagaaaggaaatagagtagaagttagtgaagtataaaacaaagagcaaagaaaatcaattaaatgaaaagctggttctttgtaaagatcagtaaaattgataaatttctagctaaactggccaagaaaaaagaaaagacatacaaattaacagtatcaggaagaaaaacagagaattcaaaggagtgtaatgcaaactttatgctagtaaatgcaataagttagatggtatggaaaaaaatgtgaacaatacaaagcagactgtggttgcctttggtggcagtagcggggtgggagtggaaggttgaattgactggaaccagaagcacaagtgaactttttggggtgatggaaatgttttgtatcttggttgcattgatagttaaatggttgtagacattgcttaaaactcactgaacacttaagtgggtatgttttattatttgtaaaatatacctcaaaagcagttttaaaaatgtattcaagtacatacttaagatctttgcattttactctgagtataccttaattttaaaatctgttttttaaaaagtattatgtagataccttttattttcccaatgtctttattaaatgacatctccacgttttgcttcttacctctatttttttttttttatttctctgtctctcaggcatgcacacacacacaccaaaaaaagtacatatgcataatccttttggctgaataaaatcagttgcaactgttatttcggcccttatttgctccgggtaaatattcgttagctgagtggtttatctgtatcagatatttcttacatcttcatccagtcacaccagctggactgaccagattgtttttcacttcaagggcagaatttgtactcactgctgaatgcttccaaatgatacgtagaataacaaatttaagacttagatttttactttttcaggtctttttttttttttctgtgctgtatagcatttccctgaaagcttaatctcatctgtaagtgatgcagtggatgtgttactattggattaatttatttactcttaggtaggtttgtaatctgtcatcatgctgttgtttttttgtgtgggtttgtttttggttttgagacagggtctcactctgctgcccaggctggagaggctagagtgcagtgatgtgtttatgggtcactgcagattcaatctcctgggctcaagtgatcttcctgcctcaaccccttgtgtagatggaagcacaggtgcacgccaccacacccggctatttttttaaatgtattgtagagacgaggcatcatttttttgcccaaggctgatcttgaactcctgggctcaaacaatcctcccacctcggctcccaaagtgctgggattacagatgtgaaccaccactcgagctccatcattctgttattagttgttctctagtatgagtcaaaaactcttacctgcccttttacagttttataaataagtaagcagaatagcagaatgtggacattttttaaatccaaattgaatatgcacatgactcaaggagtcaaatagtaccgtaatcggtttatgataaaatccagtggtttggctgggtgtcgtggctcacacttgtaatcccagcaccttgggaggctgaggcaggtggatcacctgaagtcaggagtttgagaccagtctgacctacatggtgaaactactaaaatacaaaattagctgggcatggtggtgcatgcctgtaatcccagctacttgggaggctgaggcaggagaattgcttcaacccgggaggcagaggttgtggtgagccgatatcgcattatttcagaacaattttccacaagatcagtgagtgctgtccaatagacatataatacaacccacatacatgactttacattttcttgtagccatagtagaaaaggtcaaaagaagcagatgaaattaatagcctgggcaacaagagcaaaaccccatcttttaaaaaataaaataaaatatggtggtttgctgtccccacctcagaccatttctctggtctttctcattgaccaccactcccaatctttgttctgctgattgattacagcttgtatatatctccatatttctaagcaaaatgtttatcttttttaaatttataaattctttttattatttttcagagacagggtcttaactctgtcgcccaggctggagtacagtggcaccatcgtagctcactgtagcctcgaactcctgggctcaagcagtcttcctgcctccgcctctcaggtagctgagactacgctacaggcacataccaccatgcccagctcaaaatgtttatcttttgatacattattcgagaccattattaaggtggatgatttagttttcttaaacagccatcccctttcttttcctcccctctgcttcaccgcccccattttcccaatgttttaccttttggttaaatcagtactcattgtttacattatttgcctctgcacatagtcacagatagtattgtactgtactgtactgtgtttcttttttaaacattatttctgttgttaataattgactttttaatttttttcctattttgttttttaaagagatggggtcttactatattgcccaggctagagttcagtggctcttcgcgggcatgatcccactgctgatcagtacaggaatttccacctgctccatttccaacctggaccagttcaccccttcttaggcaacctggtggtcccccattcccgggaggtcagcatattgatgccaaacttagtgcggacacccgatcggcataacgcatgcagcccaggactcctgggctcaagcagtcctcccgggctcaagcagtcctcccacctaagcctcccgcgtagctgagactacagacacttgccaccacaccaggttaatttttgtgttttttgtagaggtggggttttgccatgttgtccagactcatctcaaacttctcagctcaagtgagcctcctgcctcagcttcccaagtagctgggattatagacgcatgccaccacaccccatgataattgcctttttttttaatttgcataattttctttgtagcttttgctaatgttcccatatcttcttatagccttacagaatgattttccacaagatcagtgagtgctgtccagtagacatataatacaacccacatacatgattttacctttttttgtagccatagtaaaaaaggtcaaaagaagcagatgaaattaatagtatcttttacttaacccagttcattcaaaatgttatttcaataaatggtcaatatttaaaatacttgagatattttgcttttatttatttcttttgttactaagtcttcaaaatccaatgtgtattttacacttacagaacatctctttttagactggccacatgtagctcagggttactgtattggacagagtggtttcagtttcaagtttttccttggagacatcctacttgaaatttccattctccatgtatctgggtggttggtctatagacttgccactcacagctgtcatcttgagactttctttgcttttcttctctattggatattcagtttcctggatttcaggtcttctcattttcctctagtagttttgttaggtcatggttggtatggcatggttgggatagcgtgttcacacagctatctcgtgagtcatactcctccaatccagcctgctcgcttcccgtgtctgtcatgtagttgtcaccctgctatctctccctccagtttttgcagaaatttcctttgtcttcactcttggtcttcctctcccatcccccatgtatcctatatctttctctttcttggtttatttcatcactcaggtggaaaagatgctccagtggattactgggaaaagggggagcatggatgataaaggtattgagaccttacacgtcagggaatttttttttttttttttttttgagacggagttttgctcttgtccaggttggagtgcagtggcgccaactcggctcactgcaacctccacctcctgggttcaagtgattctcctgcctcagcctcctgagtagctgggattacaggtgcccgccaccacgcccagctaattttttgtatttttaatagagacgaggtttcactgtgttggccaggctggtcttgaactcctacttcaggcaatccacccacctcggaatgtttttattgtcccttctcatttcatgactgctgggctaggtatagaattccagaatcattgttcttagaatctcgaaggcattgcttcattgctggccagctttcagtgttcttgcaaagtctgaagctgtgctaatcacctcatcctttgaaagtgaactgttttttcttcccagaaacttacagaacattctctttgtccgcagaattctgggattgcaattactgtgccttagaatgggtctgtttttatcattatgaagagtactggatgggtcgggaggttttcttgaattacttcttgatgttttctttccttgtatttttttgtttgctaattttctatttttttttcttggtttactttcttgggcagggggatttcttctacttatatttgattcttcagttgagcttgtcatttttgctatcttgtttttaagtttcgagagacatctttgttttatataacattctgttcttaatacatagatgcaagatcttttctttctgagtatattaatatgtatttgaaatctttctattctctgcagtttgtttcccccaagggtttttttttttttctggtttttgttttttgtttttatgttagagactttcctgttatatctggtcatcagtggtacctgcatgtggtggagagtaggggcttattggagtatgagaaccttgagcaggtgtaaggagcctgtcaacactgcgctggcctcagggcctctagggaggctgccagttgtgcattctgaggataccttttggttgtgccttttgtctggtcagattatctagagatgctctgcctcctacctggaggagaagggtctagctgccagcggtgtgagtgtctcttggggaaaaggactcgagttcctggtgtttggcttgtgtatggccgcttaccccatttttggtggagcgctcacatcttccactgtgccaacagtcttgctgcagttcatagaccttctggtttacatttttccagaaagtatgtctttagatttctgcagaagtctgaggagcatggaaggagcttggggaatgagatggcaatccaggtcttcccagatggctctacctttatcccctgcagggaatcccactcctccttcctgactgggagcacagccagagccttgggaggaatctggagtggaaatctcgggcggtctggctttcttactgttcacttgtaattttgctttctcacaactgccaaccactaatcagcctgatttccagcttccagaattctattgctgttgtctgctctcctattcccaccgtaggggatggggctgtctttttttttttttttaattttggtaaaacatacaaaacataaagtgttccattttagccatttttaggtacacagttcagtggcagtaagtacattcacgttgtgtgtatttgtttttttagtaataaacaatataaaattttttaagtaataaaacacaaataaaagattgtttaatgtgattatcgtggaattttaggtgtgatcaggagccatggtgtagtcttctgttgaaacagggtgataggatttgtttaccacctcctaggaaagcagttggatagtttgttggcataaaagtacattttatctatttttaataatcgtagctttatagaaattgcagttggaactcccaggcctggcattcaaggctctctgagatctgggctacccacccatgtcctccagccgtctgtcgcacctcctactgcccactcactgttcctggcatgagatgtgatctccagcccccatgcctttgctgtgcagggtgttccagagtgaattgtccctcctgtctgtctctctgccctcttcctcgtctttccatcttcctgccccacatcactgcctcctacccaaggcctgtgctcattcctcctcggttttcccccatggcctggtacatacctctgaattatcaccttgcatttcccatattgcccggctctctttgatgtctgtttctttgctgggtcttcctcagtgtctgacggtcagttaaatgtctttattcttttttgtaggatatccgacatgaagccagtgacttcccatgtagagtggccaagcttcctaagaacaaaaaccgaaataggtacagagacgtcagtccctgtaagtatccacgtggccggtaccagtcttgctcttcctttgctgcaggcctttttagtcaagactcctttcgcctcagggtttagtataataataaatcaatgtagcagaggtttatgacgcgattgtttcctatagtaaaggcattagagacttatagtaatagctcatttttccaccattatagaagggctcaggtttcagtttctggaaaattcagtgaagttcaaagcacttttcttaagctttgactgtttttgtgatgaatcattttcctaccagctgaagcagagtatagcaggcataataaaaccttttctggatgactcagcagcagcgtcattagggcatgagcactgtgttccgctgtaatgaagccccgcacaggcattcggggtgggcactgtcgtcccctgcgctgaatatgcaaggcagctctgtctggagtccccaccgcctccacccccgccaacctcatcatttttctccctctttcctgctgttagttcttcctaggattgtcagtgtgcctgctggcctgtggcagccctgtccgccttctgagtgattggctgtcagtctgccggtagctgaaaagtaaataacttaacatgttagaatttgcataaagtaaggaaaactggagctgagtacaggacttgaactgcgccatctcctctaggccacagaggcctttttgacccccttccaggtctttagacattgtcaggcagtgaggggtcgtagctgccagtgtctccatggtagcgtgctctgccagggatgcagaagattctccagtcattcctccagtgggcacttcctgcaggtcctgtgcccatggctgggagtggtggctgtcattgttctctgccagaagggttagcagtgcatcctgacctgacttatgtggcgcccagattcctggaaggggtctaaaaatggacctagacttggtgtagaacgtgtgcctcttggcctgccaccatggttccctgcctggttttgtgtgtcagctctgccgcttaagaactgagtggcttcgggcaagttgttctctctcataggagtgtgtgaagatgaagcaacataagctgcttagcccagcgcccagtacctcacgcagacataagtgctcagtaaatgttgtctgtggtggggatggttgtcaccaacatctgaagtgcacttctaggtcatcaggtgacatgattggcgccaacacatggtactcttgatttagcacatctcagctgaggcacctcattgatatttgtttaaaaacaaaaacaaaaaaccttggtgattctgctgtgaagtcctggccagaaacctccagaccgctgatcaacacgcaacagaaccatcaccgttcacctctttgacatggtgccaggataccctggatctctagcttttgctatagttgctctaattagggaataatcttgtctttaatattcctttgctacattttttaacatttcttatctaaatggttttatgaatcagttttacagagaaaaaaaaccagtatttaaaatattcttccaggggctggtccaagtacagtagtgtttacaactatgtgatcacaaccagttacagatttctttgttccttctccatccccactgctttacttgactagccaaaaaaaaaaaaaaaaaaagttattccagggaaacaattctccaactttttcactcccaatctcactcctcttatcttcctcccgtactcctatcctcctcccgtactcctatcctcctcccctactcctatcctccagtagaaacagtcatttgctgtgaaggttatgggggagaatgagtcaaggtagaaggtcacctgctgcccagctcacagtgctgctggtgatgacagcagtccacagttacaggcacttgctgaacgaggggctctgtatacacctcagctcattgactcttcccacaaccctcttgtcacctaccatttagcaaatgaaaaaaccaaggctctgaggtgagttgtttgcccagagtcacccagtgctgtttgaacccactcacataaccaaccaataccattatgtaatttttgaggtcttttatctctgtgatccacttaaaaattatccaagtatctttatttgtactaagcctccataatgagaaacagtgttccagatggtggctagttttcaaagacatctctctttggaattcttctttagaacaaaaagccccagaccacttatccccattcatatcccctttggacctagggagaaggtactatttataggtgatcacctgagtttattgtcccttgtgctgtgccagaaataaaggtccccacctgctcttattagctctactaacaggataaggaaagtggccctcagagagctactgcttttgtgacaaacaaatgatacaagaaaaaaaaagtggctttttaattttagtgacctggggcaggacttccaaatgaaagtttatttctaaaaactaaaaggtaaatttaatatactttcagtgtttgggcttaaattctctttcaagtgtctttgtgatatgctctgaattttaaaaatttagaatcattgaagttcattatacttgaactttaaaaaaaaaaaacaaaaacctcgtataaaggtcaaggtatgacttcatgctgctgtgtacttaggtcatttaatcttcaaaccactggatagaggttaggttgaagttcgatcttaaatcctacctactgtagctcattgtaccagcaacagctgtagggactaggtggaattcatggtgggttttgttcccttttaaagattgaagccaccatattttctgccctctaaaagtttatgtcagccaggcatgggtggctcacacttgtaatcccagcactttggggaggctgaggtgggtggatcacttgaggccaggagttcgagaccagcctggccaacatggtgaaaccccatctctactaaaaatagaaaaattaggtgagcatggtggcctgcgcctgtaatcccagctactcgggaggctgaggcaggagaaacatttgaatccgggagatggaggctgcagtgagctgagaacatgccactgcactccagcctgggtgacagagtgagactcttgactcaaaaaaaaaagttatgcatcagagaacagatcctttgatgccctcctctgccctgaaaggtttttgggggagagtaataagtatcacaacaagatatgacctgagaacagatttcccagataggacatgatccatgttttaatatggcttactgctgttgcttcatagtgtgaagcttcagacacttctgaaaaccctttcagaaaatcccagtcgccccatactgatgactaatctcaactaaaacagggcttcagccagtgtgaatgccactaatgccaccaactcacctttgcttttctgtagggtgtgcacctgtatgtacacattcagcttttccgggattaacctctgagttctggtttgtctttcagttgaccatagtcggattaaactacatcaagaagataatgactatatcaacgctagtttgataaaaatggaagaagcccaaaggagttacattcttacccaggtaagcagattgtctgaattttctatttaatgtcaatttaagagtttgagagtgctgttatccacacctcaaataaaatctgccacatcctttagaaggtcaggatttcagcataccaaaaagcagcaaggaagggggaaaaatcatccttcaaaggttcagtttggttataaggaacgctaatcttttctgggaagcataagatgacattgctggaaatgagagcttatagaaaacaacattaaaatgccagagttgcctgtgtggtctgttggcagagacagcagagccatggctggaggagggtctgtacctgtgttgcttccagaagtatttgtcgtagagcacttgtgatggcaaatctaagaacgttagcagtagaccaggaatctctgtccagagccattcagagtagctcagcatggttctcattctttggccagaagaaaggcatcattggatcatgtgaacaagcatgaaaaatgacttaaaatttctgttggcttttggcatctttatggaaacaaaatcctgaaagtggtttaataattgagcctcttgtaaaacactcagtggcatgtgaccaaaagggtatctgggaaagaggataaaaagagtttctttttaattaatcttctcaagtcttaacttgttacctgtaagttggtctaaaaagactgggtttcttattttgtttttcatcataatttttgtttctcattccatgtcagctttcagtcttatatggctttaggccacagggcgattttgaacatttgtaattttgcttaataattaggaaattaaaattctggggaagacagaatgctctatgaagaaaggctgctttgagcaaggagctaggtcagggcgcgttcaactgaggcctttcttcactgcctttttgtcttgtcccagttcctccccatttatgactaaaatcagcccagatgcttctcgtcatctgggatgcagagcatcagcccagctgtgttcagtcctatggggccattgagtaagttcttggtgcatggatacagggcaggcctttaccaggccctgagcccctggtcctcccagcacctctggggtatttaggggaggctgatgggggagggggttgataaggcgggagatgtctggggatgaggttgaggcaaaagtgacttcttgaggactttgctttttggagaagtcaaatttcctacttcttgatttcagcccttcaactctggtatggagtcaggaagccctttaaatacctgttgtcgggtgtatcatgtcaagtgttgcattagcaaatgaccatgtatccttgtgctactgtcctgcctaccccgcatcctagcgcttccttgggacatgagaagctctgtctggtttgtgaggtggcactggggatgttgagaaactgtttacacagtttccctttgccctggggatttactaaaggagtcgaggcagcctgaccccaaagcatcacccctggacactatgaccgaaacatttccccagtgcccaaaccaagaacacccttcccatttttttttcagtggtgttcattatgtaataatacaagtctctcttctcattttttaaaagtcagaagtacagaagagcagagaataatgtccaaggggccctccttcacctcccccgtgcagtgtcagctaagtgtggtgcgtgtccttgcagatcttaggggattgtgatccttcagaccattctaaactggggtggtgctgggagttagggaaggcatgaagggagtagtggagagctgcagtgactggggtcttcatgccagggtggagaatgcaaggcccaggtggccagccatgtgccacgggatttctggctgccaagagctgtttatctgttcactggggagggaagagttaaatgtggtctgcttttctccgagtcccttcagcacagggagtgctgacttgtcttgttcaggtagtaagttcaagatgagctcaggaaagaaagtgagaggacactgagggctagtggttgagccaagtgtgatgggacttaaagggagaagatttaaagaataaggagcttatgggccggggacggtggcttacgcctgtaatcccagcactttgggaggctgaagcaggtggatcacttgggtcaggagttcgaggccagcctggccaacatggtgaaaccccgtctctactaaaaatacagaaattagctgggtgtggtagtgtgcacctgtaatcccagctacttgggaggctgagacaggagaatcgcttgagcccaggaggcagaggttgcagtgagccaggattgcgcccctgtactccagcctgggtgatggagcgagactctgcctcaaaaaaaattaaaaaaaaataaagaggttaggtgaaaatagatgagaatggaaaccatgagaagaagtgatgctggccaaggacatgacaggttctgatgtggaggtgataggcaatgtctcttccagccactgctaataattgagacaaactcaaggcattcataccctgtgtccagtaaacatctgtgcccattgccaggtgagctggattgaaatgggccagctgctcagcagacaccctcatgccccagtgactctgttccccttgggccacctcattgaccatttatgtttctacatctcctaagtttgttgggccaaggatggaggctgtctgccgtcagggtcctcattgctgatggtaggaatagttgctgatgtttcattggatgttgctgtattctagggactgtgctaagtactttatagaaatgaacatacttcattttcacagttttatgaatagggactattattagtcaagtaagcgatggggaaactggggcagggagcgatgaagtgacttgcgcaaggtcacaagatgatgtgattggaaccaagagaagtgttgtggttggccacgcccccacactgcctctcatctgcaccaaggagttttgtcccatagcccaagggccttggggacgaatctcagtggaggcccttagcgggcctgcctgagccagaaagcagaatcggcatttttctgtccttggttggcccagccctgaactgagatgcggaaatcgcctttcgctgcctggtagaaaatggagctgcagttactgaccaccaggcagagagaggtgggtccctgtcccagcctcagccaccactctgcctaagctgtggggactgagggcgctgtcgttagctgactgcagaaggtgagcacacgctgtagcatgttatgtttcagatgtcacatgttgtgttattgtgtctttgcagggccctttgcctaacacatgcggtcacttttgggagatggtgtgggagcagaaaagcaggggtgtcgtcatgctcaacagagtgatggagaaaggttcggtaagtctcggcttcatttgctgtgtatgtgatcatgcataccactccatatagttaccattttcgtccagatttttaaattatttttcttgcctttgtatttcctttacgtagtatttttatttaaaaaaattaaaacagcagcatataaatgcatgttggttgtcaaccagttaatgaagtgaataaaagggaggaggcggaagaactgcacggacctcttcgcccccgccttctcctgtgtggtgcgtgtggcgctccgcccacctgtgctgcctgtgcggctctcatcacagtgtggagttgtgtgtggagttatggagacctgcttttatcttgaaaagcaagttcttagtgcatcttcatggtgtctgattttttggctggtgagagtgtggctacctctgcggagctgtgggagcggctgactagatgagatttgcctccattcagtacctagactcttgccctgccacacctcttcggagtgagcattgacttcaggatgtgtgtcattctaagttcctgcaacttttcaaacacccctcgggctagcgtgtggctgcacggtgtccatttgtgcaggccaccactcctcttgcatctgggtctagccacctctccttcttgacttaccatagttcattttgtaccatgctttcagaatgagctttctcaaatccaagtctcaccacggttcttcccagctgaaaacccttgtgcggttccctttgcctcacaggataatacatggtgtggcttacggaaccctgcaggtctggccctaggcccctggacacagacctctcaccactcttggaactttagccaggacaaagttttctgtttttagtttcttaccatgttctctgggccgaggagtcccagtgcccacgttcatcccacttgcaggcacccctggacggctgcccccagctccccaactgcctgcattctcccctgccctcctcactctgttggaatagctgagaatagccgatttctgggcagccggcctcctgtgtagactgtcctgtgtagactgtcctgtgtagattgtctgtgtagactgtcctgtgtagattgtctgtgtagactgtcctgtgtagactgtccatgtaaactgtcctgtgtagattgtctgtgtagactgtcctgtgtagactgtcctgtgtagattgtctgtgtagactgtctctgtagaccgtcgtgtatagactgtcctgtgtagactgtctctgtagaccgtcgtgtatagactgtcctgtgtagactgtctctgtagaccgtcctgtgtagattgtctgtgtagaccatcctgtgtagaccatcccatttagaccatctgcctgtgcaggcgcaggccagtgttcagcagggccacaggctcctcggcctccctgccctcgctgctccccaacactgccaaccctgctgcggggtccaggaggagatgggctgaggatcgtggagaccagcaggagcgtgtggcccaggagcagggaactgggtgtccttgggccttgccaggtccaggctcagctaggacacggctctcacagctgtcctggttgcctccggccacagaagaaggtgagggctccagagaggccacctttccaaaaaaagcacagtcatggccctagaatgtaaaaaatccaagtgttaagaaggaacacatcaaaggaaacttcagcagtgaaaacttgaagcattaaccacgaagcctctgcctccaccacacacaaagaaacggctttagttactcgcagaaagtcttcctcttaggacagcgcgtgtttaaaatcataggggtttggtttgttttgttttggggttggggttttttgggggttttttacccttgcctactttttaaaaaatgaaagtgtttatttgcccaacaataacagacagggagcttgcctaagtgttctgttgatgatataatgtatcttgtcttagaaaaaaactttttcagtgaaaggtggtttttaaattttttcttccctccttagtagcttgattagtaaaatgtgaagttacaaatgtgaagcaaacccccacccttcaccactagtcagcaattttgagtaaagaaacaaagcatcaggtgctcacagcacacactgtcttagagggaaggggaagcctggtggcctgtggaagccttcagcatagctccatctgcaggcttctgaccctcagcactactgacacttgggctggatcattgtctgctagggatccgggcagggagtggctgtgctgggcgctgtaggaagtttagcagcatctctggcctctatccaccagatgccagtagcaccccctccccagatgtggcagtcagatgtgtttctgtctagactccagactttgtccaacgtcccctggtaggccaaattgcccccggttgagaaccaccgctctagatggtattgagggttgggaattttaaatcaagacatttattcagaaattaccagatatagtagcatttgcttcttatttatttctttgttgctaagtgtttggcaaaacctctttgctgtgagcacaaggtttgctttagcaattgttgtcacattacagcaaggagtggtgtccagcgctgtagttatgtatttgagcagtgtccagtgctgtagttatgtgttccagcctcaccaggccctgtgcttcattgtctcccactcaagactgaccacaaatggcccacagatccactgtgacaacctttccctttgggttactgtggtggcatcgagaacatggctggttggctttgctgtagtttactgtgataactgtgccagcagtccctgctttcctttgttaagtatcccattccactggaggattacttgggcgtgcagattggcatgaaaagcaatgtatggtttgagattgttaaagtttctttgggatcaacattttcaattctgtatcagcattatccctcccagagggctggctgggagaaatcatgagaagttacagtatcttatttgctcagctaatctaattataaatgatccacacagcttgtggtaaaaccagcttttggggagttttcatttaatgcatacttgtcttctgatttccttccttcaccaaatagtgtaggatgctccctcttatttttggcaaacatgcctgttatcttttgggaccctgggcttcctggaaaccagttatgcagaagatgattgtgtgtgttagactggggtcatccagatggctagagttctcactggttctgtttaaggattgactttagacacctcagtgtaggctgcaccatggcgtaagggttgggattgttgtttagaagggggaagtaagcaaggtgagtttaattggccattgcagaatctcacccgtatctccctcctgaaatcctcactaaagctgccgtttgctttcaggtgctttcatgcacaagacactgcattttgtatcacagggtccatataattcatttttctctcgtacttagttctctgtgttaagaattacttacttagttctctgtgttaataatttttggcgaaaccaaattacccgtcacagggttactgtagatgtctttcataggttttccaaacaccacttgcccacttgtttgggaaggccccaaggactgtttaacatctgccttcatggtggaaacagcaactatgagagatgctagcatgttggcactgccatgttcctctggtaccagcccaagataggactcaatttgaggcctggtgaagtactgtgttctaataaaaatccatctacttttcatggccgtatatatcaatgtaatagggtaactggaaatgtgatcttgtgccttttaaaaattttgtgtgtttaaaacaaaaatttctattggaaatgacagagcatagcttgttgctgtagacacctgagagtccttaaaaataaatattgggttattgacacttagttgcatgacagaattcctcacttgtacagttccaaagtcttagtctttacccagattacagagggttattaagcattaggtttggttttgaaagtgagtgcttgctgtctggaggtgagctttaagactcgtctgccctgcttatgagatgaggaagggtggcctcttcctcctgcatttctgttcttcgcttccttctctgtctgctcactctgtggaatgcccaccccagcacgggtggggtggaacctgtcagatcagtctcttgtttctggggtcttgaggcattataagatctagttgttagaagtgtgggattaattcatcttttcacattcttctaagttcctgcttttagctgccacacccactttggctaagtgggggtcttgccatgtaattagcgcctccatgccaagtggcagaattgcttcaatggtgacagattgtccccattcaagagttcacttttggcaactcatcattgatccaggaaggtgacatggatgaaactggctaagacttcagacaggcttgtgtccagactcttgagaaagctctgttggcttctggtctggcactgtgaagtttgctgtgatgctggcaccacaacctggtgtttcctaatttgtttctcccacattttgctttggttttgtcttttgggcagcttccagctccagtagagcaggaccaataggcatttgtggttctatattcaccctcctcacgtgcttcctggctcctcattgcccccagatgatgccacaggtccctgggcctgctgccagtcgtctgtgatctgggcctctgctggccccttctccagctgctcttttcagcctcttatttgcagtcactgcctaggaaatcctagtcatccttcaaaacctgcctcttgcacagagctttctctgatctctcttttctgtaaccttggctgacctgaaacatttccctcttctgaattcctgctgcatgtccgtagcatttccccctcagccctcccccatagtccaccttgtcactgctgggcacagcagtgtcttctgacagacagctggccctgaagtggttcccttcacccacaccatcctttgccccagaggaggtattgagtgggtcagtgcacgtgaactgccagtgtcatttgccaaagagctgttgacacacgctgacatttcttttgctgaaaatcataagggctttgagcttccctctgtccaggcacatggtcaggctgacccggtagctctgcccctgctgacctgccatttttgtccacaacagttatccatgagcagaaacatttgtgtaactgaggcagaaacttagttcaagtaaaatgtcactaaattcgagtcagtttttgtcttagaccctaaatgaaaccaaattttcataaattttcttgttttaaagaaaaatttaatgagctacatttaaactgagaacatcagatagtgtctgagattatcaaaatagaacatcaaaagtatttttctgaatgaactgaaccaaaccagaatgaaagggcaagccctggggagcctgtctccaagccttctctgaaagggagtctgtatttggtgataactgctcagcctctccaaagggcctcacctgctgtctctcccagttttatttttaattgcctgtgagttttctgtgcagggtaaggcacctacattctatgccagcagcctgatcaggtcctgggtaatgtttgaaatggctacacagaggagtttcaaagccttttgttcaatctggcttcacctcgtagacggtgagaaagcgtcagagccctgcaggatcccgttgccacgtttgaccggggagccgatgggtttggaagtctgagccctgtctgcacaacctgccccggtcagcagcttcgtgcccccacccccatctccccatgaggcaggcatctgtgctgaccatggcttccatgttcagaaacccccaggcctttgagttatcatgaagcttgtgggatgtgctccaagcctcctgccatagaaaaactgccatattgctcacaataattcactattatttgtttccccagttaaaatgcgcacaatactggccacaaaaagaagaaaaagagatgatctttgaagacacaaatttgaaattaacattgatctctgaagatatcaagtcatattatacagtgcgacagctagaattggaaaaccttacagtgagtatagcacacacttcagcacttcaggcggctactggttcacatgcctcttcctttatcccttgggtgatattacctaatgtcagtgttcctggcttttgtataccccgagcaagatgtggtttgggcactgtggtgagcggagcttacttgtgtacctaccaagtgcccagggagggtggaggccacagtgctctctctgacctttaacaacagttaacaccagttcttagggaaaggagagtttcttacccaaaagactggttcctgcttgtgcagctgcagagggactggagcggcagcctgcaagtcccagtgaagcatgctgccttctttgtggtcctcagtcttcgagtctgaagagagggaagaaggggtataggggctcactccagtttcatagctagtgaaagttttctgggccaggtcttgggtttttttgttgtgggaagagtttataacaccagctacttgcttggtaaaagttggtcttggaacatggcaaggcattgtggcaagcagcactgccgctgaacgcgctgctcctggggctttggaataattcccctggatccgtaacttgggggtgttcatgtcattctggggaacagtggagggagtgcgcggcagcacctgggggcaccagtgaagagtggccagccaccaacctctagaacctaactggggtcgaatcctggccccaccttactagctcatcacagtgtctccgtttcctcttctgtcaaactcaggttttgcgagggttctgggaggtcctatacgggaagggttagcagttaccatgggtgtgtagcacgggctttatctgaagggaaggtggagccgtagggagaccatgtggagtggggctccagggctgtgtgggtggggagggatctgcttctgggttaccccatgcctccccttctcaagtactactttttaatcatcatggctcctgccattcatttcatagttgatgtaagccaggtgcggtggctcacgtctttaatcccagcacttggggaggctgaggccaggaggatcactcgaggccaggagttcaagaccagcttgggcaacatagtgagacccccgtctctacaaaaaaacaaaaacagttagtcagacatcgtggtgctcccctatagtccagctactcaggaggctgaggcaggaggattgcttgtgcccgggagttcaaggctgcagtgagctatgcttgcaccactgcactctagcctgggtgacagagcaagaccctgtctcaaaaataaataaataaaaaaaatagtagaagtaagatctagaatgtagcacaggttaccaggacgtaggcaaggggttcgggctgcctggctcttgaggatggtagcagtgcagctgatgtgagtgctttctgccctctggtggtgaccgcgccggagtcaccagccctgccatagccctgatggggcagagggttctgagtacggtggatggaggtgctttctggaagattctcaggagtaacatgggcagtgtgttggaatgtgctagaggatttatgcagtagccttttaaaagaatgctttttagcatttgcaagcctgacattaagagtgacttctgggaaactatttgcttgttgagggaaactgaatttcaacagagcagaagagctgtgcgctttttgcttggcagagtgaatacagccagctcagaggttttgatgttaggatctgtttgctccaacagactttgtttttaaaaggcttttctcagccatagctgtctgttctagcacaaggctggaatgagttccttgtgaaagaggtgagcaggtgtgagggagggtgtcagtgggcggtaacccacaccttcaaggattaaaggaaaacttgcatttggcatgcttgcttcttattcaattttaaaatacattttaacggccgggcacggtggctaacacctgtaatcccagcactttgaggggctgaggtgggtggttcacgaggccaggggttcaagaccagcctggccaagatggtgaaaccccatctctactaaaaatacaaaaaaaaaaaaaattagccgggcgtggtggcgggcacctgtaatcccagctactcgggaggctgaggcagagaattgcttgaacccaggaggcggaggttgcattgagccgagatcatgccactgcattccagcctgggcggcagagcaagactctgtctcaaaataataataataattttttaaaaatacattttaagtccttttcttccccacctgcctccacccaccaaatagaagaggtatttcttcttctttaatgtcattaaggttatatggataccattttctagagaggaaagaatgatggaattgcctagtgtgagtctagcaattatcctaacatacacaaatttctccttgttctgtgccaagatactgtatttaatatttaatgaacattaaatattatttactagtgtatttaatggctgaggcagggttaaatatgtattattttcatcccagcagagttgggggaggtcctagtaactatgccatgagctctgtgagggtgaggtggtgtctttgcccccgcctccctggcacagtgactggcacatgattggcatagtgtggacattcgtcaagtgaaggaaggcatcatgagcagatctctggcctgaatccttctgccatcagctgctcgccaggtggccctggcactgggccacagggaaactctccaggctggtatggttcctgtctgtggctgtcttcccgggcccatgttaggagactttcacttccagagccctttccctctcagggccttgcttaccaagtgactggttcccatttactaggagctcttaggtcattgaagatgttgcgtactccccccagtgagggctgccttttgatcacagccgccagaagcctcaaggaaggagcagagctggaaacagacgccaggccattgcttctgttcctctggggcagacccagccacggaagagacattctgggacaagggctggggtccacctttcaaacgtgtctgcagcaggctctcagcatggactctctgcctccaaacatccacctcctcatcggaaaatggatgggagtgcctgcctggagcagctggtgggagagcgcagcgccagcacgtaggacacactcggttcatgggctgatgccgttcgcattgactgcctcttcagctgggtgttgagccacaccttggagtcaccagtctttggagaccaagtctgctacttttttctctaaagtgacaatcctctgaaacctccagatcatcttgaagcccccgtctgaaagttgcccagagccagtgcctcacctgctgttccttgttcactttttcacgggaggccttgcagggctttatgacaagattttatgggtggctgcccagcatcattgtgactcgtgagacagagagaaaccagttgtaaccatgtagacagtggaagtgatagggagaaaagaggtgaggggactcttcaatccgaagggaaatgaagtctaagcaggcgcaccctgcaggttcagtgtcaagcccagggcctggccccagggtgtggtatttgttgactgggtgtgtggaccctgggagaaagtctgagaatgaatgttcctcttagaggtagagagtggaaggtgactctgtgtgtacttggaattagtgatttctgtacagatgattcttttagaatcatcatgagtatttttctctttcagacccaagaaactcgagagatcttacatttccactataccacatggcctgactttggagtccctgaatcaccagcctcattcttgaactttcttttcaaagtccgagagtcagggtcactcagcccggagcacgggcccgttgtggtgcactgcagtgcaggcatcggcaggtctggaaccttctgtctggctgatacctgcctcttgctggtaaggaggccctcgcgggtgccctggggagctcctctacctgctctgctgtgatgttttttcctaagtagaaactgaagcgctcctcttccaaaatacagagactcactgtgttagtctgtttttgcgttactaataaaggcgtacctgagactcggtaatttgtaaagaaaagaggtttaactggctcccggttctgcaggctgtacaagcatggcaccagcatctgctcggctcctggggaggcctcagggagcttccagtcatggtggaaggtgaaggggagcaggagcaagagatgggggaggtcccagactcttaaccagctctcttgtgaatgcattgcctcagggagggcaccaagcctttcatgagggacctgtccccctgacccagacacctcccacccagccccacctccaacactagggatcacatttcagcatgagattgggaggggacagacatctaacggtgttattaacgttgcccttgagaattggacctggctgacttatatctcctctctggctttcagatggacaagaggaaagacccttcttccgttgatatcaagaaagtgctgttagaaatgaggaagtttcggatggggctgatccagacagccgaccagctgcgcttctcctacctggctgtgatcgaaggtgccaaattcatcatgggggactcttccgtgcaggtcagcattgcctttgtttgaatccaggtgtgaccattttaacttttttgtctttgaaggaggctgtcagttgtaaaagttcaaacaccgtctggtgtcaggggaaatagctacccttcatgtttaaaatagctagaaagttgtcaaaatgttcaccatgttgcactttgtgcctttgaagtgctcacatagagagcattgataggaagacgagactttattttcaaaagatttcatcttccaagtacatggctgcagccctgagaggccgagagcccctcgccaagccgtcacctctgctcatgcaaagggatttcctgacaaaccagccgaagtgaacactaataggacttcctcttgctgctctttcaaggatcagtggaaggagctttcccacgaggacctggagcccccacccgagcatatccccccacctccccggccacccaaacgaatcctggagccacacaatgggaaatgcagggagttcttcccaaatcaccagtgggtgaaggaagagacccaggaggataaagactgccccatcaaggaagaaaaaggaagccccttaaatgccgcaccctacggcatcgaaaggtaatatgattgggtcccagcttgttggggtgaggggaaatgactttctgttctagaaacacacgctggtactgaaaccctgtggatgcagcctcctgttggcaagcagcgcttccgcatccttggggaacagggcgcgtggaccacagccactccactcctggctgctggaggtccggtattgggcacagggtggccgcaggacatgagccacttctgtgggcttctagtgccaccttgtggtgcttgttggaatgaggggctcggagccaccgagtagggtttttctgccccccctgacgacagcgccctcccccaggtttccggacagtcctgaaatgtgatgtccaggcttgagtgccctcagtccccacagtggtcctttggggaatgtaaccttttttatgtggtcttgattaaatcccattttacttccttgcaggttaacaaccattattgagtacctattgatatgtgtggtgtactgagttaactagaacatgtcccctggtctgtgttctagaccatcttgctgggaaaaaggcagacccaaagcatattttggtgggggcccatggacagtgatgtgatagaggtgtccgctgaggtggtcagggaaggctgcttgcagtaggtggccgtgcacggaaagtttgcagaatgagcaggtgttagttccagctggagatgactgccggctgtgcccttggtacctgctttctggagggaagttttaagacgtgtgcatacttgacccagcagttgtatacatggagaaatttactttgcagcaactctcaaaacaagcgtgtaaagatgtgtataggtagttgtgtttgttgtggcattgtttgtagtagtgaaaaattagagacaggccaatgatataaccagggacctgatcaattatgttctctcccggtgttgggatattctgtagctcttaaagaatgagatctgggtgtactgatgtggccagacattgcaattgcagtacatgagaaggcaaatcatacagtagtgtgtacaccagtgagtcctccagccagataaatcctcacagtgaccagtcgcccaggcaccttgtgaaccctaccctgggtgtgggtgctatctgaagtacctgggggagggggtgacaagtggacttcaggctgatgtgggccctggcctggccctccctccaagcagagggggctggctcgctggaaggttaacatcatccaactctgtctacacgtggcttgttttttcctagaattcctgccacaatagcagcatccttgccattcattttctccaaagtgagtaacccatctctgccctctgattcctcagcatgagtcaagacactgaagttagaagtcgggtcgtggggggaagtcttcgaggtgcccaggctgcctccccagccaaaggggagccgtcactgcccgagaaggacgaggaccatgcactgagttactggaagcccttcctggtcaacatgtgcgtggctacggtcctcacggccggcgcttacctctgctacagggtatgtttccactgacagacgcgctggcgagatgctcgtgtgcagagagcactggccgctagcccgatggtaggattcagttctgtggtgcatctgagccagtctcagaagaaacagatcaaaggtttttaaagtctggaactgtggaagggctaacaagagaattaaggatcgatgcactggggttttaaggagccctctggtcccaagaatataagagtctaatctcagggccttaacctattcaggagtaagtagagaaaatgccaaatacgtctgtttctctctctctttttttttttattcctttgtttttggaaaaaaatagagttacaacacattgttgtttttaacctttataaaaagcagctttttgttatttctggaacaaaaaaaaacaaagtaggcacttatgaaactttctcatacccttaggtgatgtaatcagccatataatttatatttgatttcccagggaaggaatcccaaacttttacgaatgtaaactcccttggagaagagggttaggacgctgttgcgctcaagcccccctcagctgtgtgcacactgagccaggacagggtctttgagctttcccactataagaagaacagcaacaaaaggccgtctagaaaaacagaacctgcctctgcttctgctcagggtgtccccgctgggtttccattgtcctttctccattgctccctcctgtgacagccatcttgctcatgtaccagccctcatcaccccatccccataaatgggtgtcctcgaggcctctgcctgggggtcagaggtcaccacagggtggccattggcatgtcaacccgctgttaattcagagaagtgggctccacctcattgggagaagtgccatttcagcagaaattcacacgttagacgtgtgttgctgttaagtaaggggaagagagaggactagcctcagagctctggccatggaaatgacctcctaagactttttcgtggttttaaatattttacctctttccaggtggcatctgagtacatcagatggttttgcaaaatgcaaacaattttttccttggggatgatttttggggagagggggctactgtaaaaaataaaaccaaaaccccctttgctccctcggaggttgaagttgccggggggtgtggccggggtcatgcatgaggcgacagctctgcaggtgcgggtctgggctcatctgaactgtttggtttcattccagttcctgttcaacagcaacacatagcctgaccctcctccactccacctccacccactgtccgcctctgcccgcagagcccacgcccgactagcaggcatgccgcggtaggtaagggccgccggaccgcgtagagagccgggccccggacggacgttggttctgcactaaaacccatcttccccggatgtgtgtctcacccctcatccttttactttttgccccttccactttgagtaccaaatccacaagccattttttgaggagagtgaaagagagtaccatgctggcggcgcagagggaaggggcctacacccgtcttggggctcgccccacccagggctccctcctggagcatcccaggcgggcggcacgccaacagccccccccttgaatctgcagggagcaactctccactccatatttatttaaacaattttttccccaaaggcatccatagtgcactagcattttcttgaaccaataatgtattaaaattttttgatgtcagccttgcatcaagggctttatcaaaaagtacaataataaatcctcaggtagtactgggaatggaaggctttgccatgggcctgctgcgtcagaccagtactgggaaggaggacggttgtaagcagttgttatttagtgatattgtgggtaacgtgagaagatagaacaatgctataatatataatgaacacgtgggtatttaataagaaacatgatgtgagattactttgtcccgcttattctcctccctgttatctgctagatctagttctcaatcactgctcccccgtgtgtattagaatgcatgtaaggtcttcttgtgtcctgatgaaaaatatgtgcttgaaatgagaaactttgatctctgcttactaatgtgccccatgtccaagtccaacctgcctgtgcatgacctgatcattacatggctgtggttcctaagcctgttgctgaagtcattgtcgctcagcaatagggtgcagttttccaggaataggcatttgcctaattcctggcatgacactctagtgacttcctggtgaggcccagcctgtcctggtacagcagggtcttgctgtaactcagacattccaagggtatgggaagccatattcacacctcacgctctggacatgatttagggaagcagggacaccccccgccccccacctttgggatcagcctccgccattccaagtcaacactcttcttgagcagaccgtgatttggaagagaggcacctgctggaaaccacacttcttgaaacagcctgggtgacggtcctttaggcagcctgccgccgtctctgtcccggttcaccttgccgagagaggcgcgtctgccccaccctcaaaccctgtggggcctgatggtgctcacgactcttcctgcaaagggaactgaagacctccacattaagtggctttttaacatgaaaaacacggcagctgtagctcccgagctactctcttgccagcattttcacattttgcctttctcgtggtagaagccagtacagagaaattctgtggtgggaacattcgaggtgtcaccctgcagagctatggtgaggtgtggataaggcttaggtgccaggctgtaagcattctgagctgggcttgttgtttttaagtcctgtatatgtatgtagtagtttgggtgtgtatatatagtagcatttcaaaatggacgtactggtttaacctcctatccttggagagcagctggctctccaccttgttacacattatgttagagaggtagcgagctgctctgctatatgccttaagccaatatttactcatcaggtcattattttttacaatggccatggaataaaccatttttacaaaaataaaaacaaaaaaagcaaggtgttttggtataataccttttcaggtgtgtgtggatacgtggctgcatgaccgggtgggtgggggggagtgtctcagggtcttctgtgacctcacagaactgtcagactgtacagttttccaacttgccatattcatgatgggtttgcattttagctgcaacaataaaatttttttctaaagaacatgaatttggggtgcttcccatttttttctttgcttaatagagctaaaccaggatgagtaactcctgtttctttctatccctgctgatgtgaaacagatgttgtcaatcagctggggttagagttttccacttctaagaattaacctcagcatccctgcattgccagcaccctcaggctggagcgctttccttgactgtgagcttgttgaacaccttaggcctcagcccatttccttcccaaattgacgctttgcctgtgtagggccctcagataacttaacaaacttaccagtgttgtttgaagaacagtgttttgagttgtaatctcaaaaccatatcccttacccaattacctgtaagacacaatggttaccacatctcagtacgtaaagtccacttgatatagaattgacttagaaataagacagattagtatagtttttcatttgtgtacaaaattaaacaatgtaaattccccccaaagtgatttttttgactttttgaagtaattttggacttgcaaaatgttgccaaaatagtacgaagagttccccagtaccctcgaagtttcctcgactgtttcaaagctggctgcaggcccaggctcatgagactgggaagaggacaggctgtggtcatgtggacccacaggggcctggggctgcagaagtcagtgtggcttccaccatttcaggtataaaaaagggcatctaagctttcaagaagagggaggatgctctagggcagcggtccccaaccttttctggcaccaggaaccggttccatggaagacaattttttcacaggcctgggggtggtgagggatggttttgggatagaaacttccacctcagatcatcaggcatcagattctcataaggagcttgcaacctgatctcttgcacacattcagttcacaatagggttcacgctcctaagagaacctgatgctgcagctgatctaacaggagatggagctcaggtggtcatgctcagtcgctcgccactcacctcctgccatgcagtccagttcctaacaggcctcagaccagtaccggtctgtggcctgggggttgaggacccctgctctaggctggtactgctgatgcttaaaaagagagggtttgccagaaatcagatgggacaaaagggcaaaggccgtgccacagagtgcccatataggggagagcacgcctggagccttcgagagcatgcagagaagcctggagactgcatttaccggagctgctgcctgaggccaccctccaagtgtccccacagcgcaccacaagaccacaggagtgacctcctcactggcaggtatttggggaaacaactgctgtctactcttttgggtaaaaagtgaaacaccaatagtttaattgaaatttcagaaaattgaacatatgaacaaggcaaataaatactaagtaagttaaaaacacaaaatatgtccaggaagtatcgatgagaatgttcaagttaaagttctccaatgccattgctacagcaacctcaaaccctaggttctctctgcactattaacacagacatctcaggacatggtttgcttttttttaagacttaaataggaaactaatttttctttctttaaagcaattgcgttcttcagtgaactctttctttaggccagttgatggcttcttagcagtttattgacgagatcctagggtagcttccgaagctgggttgattgattgcatttgggtgcggatggccaaagtgagtggccctactgcctgtgctgctcagggctcctgggctgatgtggtggct

SEQ ID NO: 15 - RNA, 4978 nt, Homo sapiens
  source 1..4978: mol_type = mRNA
ggtttccggagctgcggcggcgcagactgggagggggagccgggggttccgacgtcgcagccgagggaacaagccccaaccggatcctggacaggcaccccggcttggcgctgtctctccccctcggctcggagaggcccttcggcctgagggagcctcgccgcccgtccccggcacacgcgcagccccggcctctcggcctctgccggagaaacagttgggacccctgattttagcaggatggcccaatggaatcagctacagcagcttgacacacggtacctggagcagctccatcagctctacagtgacagcttcccaatggagctgcggcagtttctggccccttggattgagagtcaagattgggcatatgcggccagcaaagaatcacatgccactttggtgtttcataatctcctgggagagattgaccagcagtatagccgcttcctgcaagagtcgaatgttctctatcagcacaatctacgaagaatcaagcagtttcttcagagcaggtatcttgagaagccaatggagattgcccggattgtggcccggtgcctgtgggaagaatcacgccttctacagactgcagccactgcggcccagcaagggggccaggccaaccaccccacagcagccgtggtgacggagaagcagcagatgctggagcagcaccttcaggatgtccggaagagagtgcaggatctagaacagaaaatgaaagtggtagagaatctccaggatgactttgatttcaactataaaaccctcaagagtcaaggagacatgcaagatctgaatggaaacaaccagtcagtgaccaggcagaagatgcagcagctggaacagatgctcactgcgctggaccagatgcggagaagcatcgtgagtgagctggcggggcttttgtcagcgatggagtacgtgcagaaaactctcacggacgaggagctggctgactggaagaggcggcaacagattgcctgcattggaggcccgcccaacatctgcctagatcggctagaaaactggataacgtcattagcagaatctcaacttcagacccgtcaacaaattaagaaactggaggagttgcagcaaaaagtttcctacaaaggggaccccattgtacagcaccggccgatgctggaggagagaatcgtggagctgtttagaaacttaatgaaaagtgcctttgtggtggagcggcagccctgcatgcccatgcatcctgaccggcccctcgtcatcaagaccggcgtccagttcactactaaagtcaggttgctggtcaaattccctgagttgaattatcagcttaaaattaaagtgtgcattgacaaagactctggggacgttgcagctctcagaggatcccggaaatttaacattctgggcacaaacacaaaagtgatgaacatggaagaatccaacaacggcagcctctctgcagaattcaaacacttgaccctgagggagcagagatgtgggaatgggggccgagccaattgtgatgcttccctgattgtgactgaggagctgcacctgatcacctttgagaccgaggtgtatcaccaaggcctcaagattgacctagagacccactccttgccagttgtggtgatctccaacatctgtcagatgccaaatgcctgggcgtccatcctgtggtacaacatgctgaccaacaatcccaagaatgtaaacttttttaccaagcccccaattggaacctgggatcaagtggccgaggtcctgagctggcagttctcctccaccaccaagcgaggactgagcatcgagcagctgactacactggcagagaaactcttgggacctggtgtgaattattcagggtgtcagatcacatgggctaaattttgcaaagaaaacatggctggcaagggcttctccttctgggtctggctggacaatatcattgaccttgtgaaaaagtacatcctggccctttggaacgaagggtacatcatgggctttatcagtaaggagcgggagcgggccatcttgagcactaagcctccaggcaccttcctgctaagattcagtgaaagcagcaaagaaggaggcgtcactttcacttgggtggagaaggacatcagcggtaagacccagatccagtccgtggaaccatacacaaagcagcagctgaacaacatgtcatttgctgaaatcatcatgggctataagatcatggatgctaccaatatcctggtgtctccactggtctatctctatcctgacattcccaaggaggaggcattcggaaagtattgtcggccagagagccaggagcatcctgaagctgacccaggtagcgctgccccatacctgaagaccaagtttatctgtgtgacaccaacgacctgcagcaataccattgacctgccgatgtccccccgcactttagattcattgatgcagtttggaaataatggtgaaggtgctgaaccctcagcaggagggcagtttgagtccctcacctttgacatggagttgacctcggagtgcgctacctcccccatgtgaggagctgagaacggaagctgcagaaagatacgactgaggcgcctacctgcattctgccacccctcacacagccaaaccccagatcatctgaaactactaactttgtggttccagattttttttaatctcctacttctgctatctttgagcaatctgggcacttttaaaaatagagaaatgagtgaatgtgggtgatctgcttttatctaaatgcaaataaggatgtgttctctgagacccatgatcaggggatgtggcggggggtggctagagggagaaaaaggaaatgtcttgtgttgttttgttcccctgccctcctttctcagcagctttttgttattgttgttgttgttcttagacaagtgcctcctggtgcctgcggcatccttctgcctgtttctgtaagcaaatgccacaggccacctatagctacatactcctggcattgcactttttaaccttgctgacatccaaatagaagataggactatctaagccctaggtttctttttaaattaagaaataataacaattaaagggcaaaaaacactgtatcagcatagcctttctgtatttaagaaacttaagcagccgggcatggtggctcacgcctgtaatcccagcactttgggaggccgaggcggatcataaggtcaggagatcaagaccatcctggctaacacggtgaaaccccgtctctactaaaagtacaaaaaattagctgggtgtggtggtgggcgcctgtagtcccagctactcgggaggctgaggcaggagaatcgcttgaacctgagaggcggaggttgcagtgagccaaaattgcaccactgcacactgcactccatcctgggcgacagtctgagactctgtctcaaaaaaaaaaaaaaaaaaaagaaacttcagttaacagcctccttggtgctttaagcattcagcttccttcaggctggtaatttatataatccctgaaacgggcttcaggtcaaacccttaagacatctgaagctgcaacctggcctttggtgttgaaataggaaggtttaaggagaatctaagcattttagacttttttttataaatagacttattttcctttgtaatgtattggccttttagtgagtaaggctgggcagagggtgcttacaaccttgactccctttctccctggacttgatctgctgtttcagaggctaggttgtttctgtgggtgccttatcagggctgggatacttctgattctggcttccttcctgccccaccctcccgaccccagtccccctgatcctgctagaggcatgtctccttgcgtgtctaaaggtccctcatcctgtttgttttaggaatcctggtctcaggacctcatggaagaagagggggagagagttacaggttggacatgatgcacactatggggccccagcgacgtgtctggttgagctcagggaatatggttcttagccagtttcttggtgatatccagtggcacttgtaatggcgtcttcattcagttcatgcagggcaaaggcttactgataaacttgagtctgccctcgtatgagggtgtatacctggcctccctctgaggctggtgactcctccctgctggggccccacaggtgaggcagaacagctagagggcctccccgcctgcccgccttggctggctagctcgcctctcctgtgcgtatgggaacacctagcacgtgctggatgggctgcctctgactcagaggcatggccggatttggcaactcaaaaccaccttgcctcagctgatcagagtttctgtggaattctgtttgttaaatcaaattagctggtctctgaattaagggggagacgaccttctctaagatgaacagggttcgccccagtcctcctgcctggagacagttgatgtgtcatgcagagctcttacttctccagcaacactcttcagtacataataagcttaactgataaacagaatatttagaaaggtgagacttgggcttaccattgggtttaaatcatagggacctagggcgagggttcagggcttctctggagcagatattgtcaagttcatggccttaggtagcatgtatctggtcttaactctgattgtagcaaaagttctgagaggagctgagccctgttgtggcccattaaagaacagggtcctcaggccctgcccgcttcctgtccactgccccctccccatccccagcccagccgagggaatcccgtgggttgcttacctacctataaggtggtttataagctgctgtcctggccactgcattcaaattccaatgtgtacttcatagtgtaaaaatttatattattgtgaggttttttgtcttttttttttttttttttttttggtatattgctgtatctactttaacttccagaaataaacgttatataggaaccgtaaaaa

SEQ ID NO: 16 - RNA, 938 nt, Homo sapiens
  source 1..938: mol_type = mRNA
gttgactaagtcaataatcagaatcagcaggtttgcagtcagattggcagggataagcagcctagctcaggagaagtgagtataaaagccccaggctgggagcagccatcacagaagtccactcattcttggcaggatggcttctcatcgtctgctcctcctctgccttgctggactggtatttgtgtctgaggctggccctacgggcaccggtgaatccaagtgtcctctgatggtcaaagttctagatgctgtccgaggcagtcctgccatcaatgtggccgtgcatgtgttcagaaaggctgctgatgacacctgggagccatttgcctctgggaaaaccagtgagtctggagagctgcatgggctcacaactgaggaggaatttgtagaagggatatacaaagtggaaatagacaccaaatcttactggaaggcacttggcatctccccattccatgagcatgcagaggtggtattcacagccaacgactccggcccccgccgctacaccattgccgccctgctgagcccctactcctattccaccacggctgtcgtcaccaatcccaaggaatgagggacttctcctccagtggacctgaaggacgagggatgggatttcatgtaaccaagagtattccatttttactaaagcagtgttttcacctcatatgctatgttagaagtccaggcagagacaataaaacattcctgtgaaaggcacttttcattccactttaacttgattttttaaattcccttattgtcccttccaaaaaaaagagaatcaaaattttacaaagaatcaaaggaattctagaaagtatctgggcagaacgctaggagagatccaaatttccattgtcttgcaagcaaagcacgtattaaatatgatctgcagccattaaaaagacacattctgtaaaaaaaaaaaa

SEQ ID NO: 17 - DNA, 16 bp, Synthetic construct
  source 1..16: mol_type = other DNA
ttgatttaatggttgc

SEQ ID NO: 18 - DNA, 16 bp, synthetic construct
  source 1..16: mol_type = other DNA
tgatttaatggttgca

SEQ ID NO: 19 - DNA, 16 bp, Synthetic construct
  source 1..16: mol_type = other DNA
gatttaatggttgcaa

SEQ ID NO: 20 - DNA, 16 bp, Synthetic construct
  source 1..16: mol_type = other DNA
agtcgcgactctggta

SEQ ID NO: 21 - DNA, 16 bp, Synthetic construct
  source 1..16: mol_type = other DNA
gtcaatatcaaagcac

SEQ ID NO: 22 - DNA, 16 bp, Synthetic construct
  source 1..16: mol_type = other DNA
gaacattattaggcta

SEQ ID NO: 23 - DNA, 16 bp, Synthetic construct
  source 1..16: mol_type = other DNA
ccttatggatgctgct

SEQ ID NO: 24 - DNA, 16 bp, Synthetic construct
  source 1..16: mol_type = other DNA
cattgtactatgccag

SEQ ID NO: 25 - DNA, 20 bp, Synthetic construct
  source 1..20: mol_type = other DNA
tgctccgttggtgcttgttc

SEQ ID NO: 26 - DNA, 20 bp, Synthetic construct
  source 1..20: mol_type = other DNA
tcttcctgtgacagtggtgg

SEQ ID NO: 27 - DNA, 20 bp, Synthetic construct
  source 1..20: mol_type = other DNA
ttcttcctgtgacagtggtg

SEQ ID NO: 28 - DNA, 20 bp, Synthetic construct
  source 1..20: mol_type = other DNA
ggttcttcctgtgacagtgg

SEQ ID NO: 29 - DNA, 20 bp, Synthetic construct
  source 1..20: mol_type = other DNA
cgactatgcgagtgtggtgt

SEQ ID NO: 30 - DNA, 20 bp, Synthetic construct
  source 1..20: mol_type = other DNA
ccgactatgcgagtgtggtg

SEQ ID NO: 31 - DNA, 20 bp, Synthetic construct
  source 1..20: mol_type = other DNA
gcctcagtctgcttcgcacc

SEQ ID NO: 32 - DNA, 20 bp, Synthetic construct
  source 1..20: mol_type = other DNA
agcttcttgtccagctttat

SEQ ID NO: 33 - DNA, 20 bp, Synthetic construct
  source 1..20: mol_type = other DNA
agcatagttaacgagctccc

SEQ ID NO: 34 - DNA, 20 bp, Synthetic construct
  source 1..20: mol_type = other DNA
tgtcatattcctggatcctt

SEQ ID NO: 35 - DNA, 16 bp, Synthetic construct
  source 1..16: mol_type = other DNA
ggacacccacgccccc

SEQ ID NO: 36 - DNA, 20 bp, Synthetic construct
  source 1..20: mol_type = other DNA
ccctcctgtgcctggatgct

SEQ ID NO: 37 - DNA, 16 bp, Synthetic construct
  source 1..16: mol_type = other DNA
gctaaacaaccgcctt

SEQ ID NO: 38 - DNA, 20 bp, Synthetic construct
  source 1..20: mol_type = other DNA
atgcatggtgatgcttctga

SEQ ID NO: 39 - DNA, 16 bp, Synthetic construct
  source 1..16: mol_type = other DNA
catggtgatgcttctg

SEQ ID NO: 40 - DNA, 16 bp, Synthetic construct
  source 1..16: mol_type = other DNA
agagctaaacaaccgc

SEQ ID NO: 41 - DNA, 16 bp, Synthetic construct
  source 1..16: mol_type = other DNA
actcccgggacaccca

SEQ ID NO: 42 - DNA, 16 bp, Synthetic construct
  source 1..16: mol_type = other DNA
acaccctcgcctccgg

SEQ ID NO: 43 - DNA, 16 bp, Synthetic construct
  source 1..16: mol_type = other DNA
gcctccggaacaccca

SEQ ID NO: 44 - DNA, 20 bp, Synthetic construct
  source 1..20: mol_type = other DNA
acggcattggtgcacagttt

SEQ ID NO: 45 - DNA, 20 bp, Synthetic construct
  source 1..20: mol_type = other DNA
gcaaccgggatgatgagtgc

SEQ ID NO: 46 - DNA, 20 bp, Synthetic construct
  source 1..20: mol_type = other DNA
tgcacagtttctggcaggcc

SEQ ID NO: 47 - DNA, 20 bp, Synthetic construct
  source 1..20: mol_type = other DNA
ggcagcggacggcattggtg

SEQ ID NO: 48 - DNA, 20 bp, Synthetic construct
  source 1..20: mol_type = other DNA
ggtgcacagtttctggcagg

SEQ ID NO: 49 - DNA, 20 bp, Synthetic construct
  source 1..20: mol_type = other DNA
gcagccatggtgatcaggag

SEQ ID NO: 50 - DNA, 20 bp, Synthetic construct
  source 1..20: mol_type = other DNA
ggtagaaatatagttgttcc

SEQ ID NO: 51 - DNA, 20 bp, Synthetic construct
  source 1..20: mol_type = other DNA
ttcatgtgtctgcatcatgt

SEQ ID NO: 52 - DNA, 20 bp, Synthetic construct
  source 1..20: mol_type = other DNA
gcatccagcgagcaccaaag

SEQ ID NO: 53 - DNA, 20 bp, Synthetic construct
  source 1..20: mol_type = other DNA
agccatggtgatcaggaggc

SEQ ID NO: 54 - DNA, 20 bp, Synthetic construct
  source 1..20: mol_type = other DNA
cagccatggtgatcaggagg

SEQ ID NO: 55 - DNA, 20 bp, Synthetic construct
  source 1..20: mol_type = other DNA
gtctggattacagcataaac

SEQ ID NO: 56 - DNA, 20 bp, Synthetic construct
  source 1..20: mol_type = other DNA
ggtctggattacagcataaa

SEQ ID NO: 57 - DNA, 20 bp, Synthetic construct
  source 1..20: mol_type = other DNA
ccttggtctggattacagca

SEQ ID NO: 58 - DNA, 20 bp, Synthetic construct
  source 1..20: mol_type = other DNA
ccttggtctggattacagca

SEQ ID NO: 59 - DNA, 20 bp, Synthetic construct
  source 1..20: mol_type = other DNA
gtgcttgtccaggatgatgc

SEQ ID NO: 60 - DNA, 17 bp, Synthetic construct
  source 1..17: mol_type = other DNA
ggttcccgaggtgccca

SEQ ID NO: 61 - DNA, 20 bp, Synthetic construct
  source 1..20: mol_type = other DNA
tccacaggccacaggtgggc

SEQ ID NO: 62 - DNA, 20 bp, Synthetic construct
  source 1..20: mol_type = other DNA
ctctttattgttggaggaca

SEQ ID NO: 63 - DNA, 20 bp, Synthetic construct
  source 1..20: mol_type = other DNA
gcaaggctcggttgggcttc

SEQ ID NO: 64 - DNA, 17 bp, Synthetic construct
  source 1..17: mol_type = other DNA
gggcaatgcagtcctgg

SEQ ID NO: 65 - DNA, 17 bp, Synthetic construct
  source 1..17: mol_type = other DNA
gaaggtgacaccagcct

SEQ ID NO: 66 - DNA, 17 bp, Synthetic construct
  source 1..17: mol_type = other DNA
gctcagcatccacaggc

SEQ ID NO: 67 - DNA, 21 bp, Synthetic construct
  source 1..21: mol_type = other DNA
gggttcccgaggtgcccaatg

SEQ ID NO: 68 - DNA, 20 bp, Synthetic construct
  source 1..20: mol_type = other DNA
gcagaggtgaagcgaagtgc

SEQ ID NO: 69 - DNA, 20 bp, Synthetic construct
  source 1..20: mol_type = other DNA
aatggtttattccatggcca

SEQ ID NO: 70 - DNA, 20 bp, Synthetic construct
  source 1..20: mol_type = other DNA
ggtttattccatggccattg

SEQ ID NO: 71 - DNA, 20 bp, Synthetic construct
  source 1..20: mol_type = other DNA
aaatggtttattccatggcc

SEQ ID NO: 72 - DNA, 18 bp, Synthetic construct
  source 1..18: mol_type = other DNA
aatggtttattccatggc

SEQ ID NO: 73 - DNA, 16 bp, Synthetic construct
  source 1..16: mol_type = other DNA
ctatttggatgtcagc

SEQ ID NO: 74 - DNA, 20 bp, Synthetic construct
  source 1..20: mol_type = other DNA
tcttggttacatgaaatccc

SEQ ID NO: 75 - DNA, 20 bp, Synthetic construct
  source 1..20: mol_type = other DNA
cttggttacatgaaatccca

SEQ ID NO: 76 - DNA, 20 bp, Synthetic construct
  source 1..20: mol_type = other DNA
ggaatactcttggttacatg

SEQ ID NO: 77 - DNA, 20 bp, Synthetic construct
  source 1..20: mol_type = other DNA
tggaatactcttggttacat

SEQ ID NO: 78 - DNA, 20 bp, Synthetic construct
  source 1..20: mol_type = other DNA
ttttattgtctctgcctgga

SEQ ID NO: 79 - DNA, 20 bp, Synthetic construct
  source 1..20: mol_type = other DNA
gaatgttttattgtctctgc

SEQ ID NO: 80 - DNA, 20 bp, Synthetic construct
  source 1..20: mol_type = other DNA
aggaatgttttattgtctct

SEQ ID NO: 81 - DNA, 20 bp, Synthetic construct
  source 1..20: mol_type = other DNA
acaggaatgttttattgtct

SEQ ID NO: 82 - DNA, 16 bp, Synthetic construct
  source 1..16: mol_type = other DNA
tggcaagcatcctgta

SEQ ID NO: 83 - DNA, 16 bp, Synthetic construct
  source 1..16: mol_type = other DNA
ctcaatccatggcagc

SEQ ID NO: 84 - DNA, 16 bp, Synthetic construct
  source 1..16: mol_type = other DNA
accaagtttcttcagc

SEQ ID NO: 85 - DNA, 13 bp, Synthetic construct
  source 1..13: mol_type = other DNA
gcattggtattca

SEQ ID NO: 86 - DNA, 20 bp, Synthetic construct
  source 1..20: mol_type = other DNA
ttcagcattggtattcagtg

SEQ ID NO: 87 - DNA, 16 bp, Synthetic construct
  source 1..16: mol_type = other DNA
cagcattggtattcag

SEQ ID NO: 88 - DNA, 15 bp, Synthetic construct
  source 1..15: mol_type = other DNA
cagcattggtattca

SEQ ID NO: 89 - DNA, 14 bp, Synthetic construct
  source 1..14: mol_type = other DNA
agcattggtattca

SEQ ID NO: 90 - DNA, 12 bp, Synthetic construct
  source 1..12: mol_type = other DNA
gcattggtattc

SEQ ID NO: 91 - DNA, 18 bp, Synthetic construct
  source 1..18: mol_type = other DNA
cggcatgtctattttgta

SEQ ID NO: 92 - DNA, 20 bp, Synthetic construct
  source 1..20: mol_type = other DNA
ggctaaatcgctccaccaag

SEQ ID NO: 93 - DNA, 20 bp, Synthetic construct
  source 1..20: mol_type = other DNA
ctctagcgtcttaaagccga

SEQ ID NO: 94 - DNA, 20 bp, Synthetic construct
  source 1..20: mol_type = other DNA
gctgcatgatctccttggcg

SEQ ID NO: 95 - DNA, 20 bp, Synthetic construct
  source 1..20: mol_type = other DNA
acgttgaggggcatcgtcgc

SEQ ID NO: 96 - DNA, 19 bp, Synthetic construct
  source 1..19: mol_type = other DNA
gggtctgcagcgggatggt

SEQ ID NO: 97 - DNA, 21 bp, Synthetic construct
  source 1..21: mol_type = other DNA
gttactacttccacctgcctg

SEQ ID NO: 98 - DNA, 25 bp, Synthetic construct
  source 1..25: mol_type = other DNA
tatccggagggctcgccatgctgct

SEQ ID NO: 99 - DNA, 20 bp, Synthetic construct
  source 1..20: mol_type = other DNA
tcccgcctgtgacatgcatt

SEQ ID NO: 100 - DNA, 21 bp, Synthetic construct
  source 1..21: mol_type = other DNA
cagcagcagagtcttcatcat

SEQ ID NO: 101 - DNA, 20 bp, Synthetic construct
  source 1..20: mol_type = other DNA
gggacgcggcgctcggtcat

SEQ ID NO: 102 - DNA, 20 bp, Synthetic construct
  source 1..20: mol_type = other DNA
ccacaagctgtccagtctaa

SEQ ID NO: 103 - DNA, 20 bp, Synthetic construct
  source 1..20: mol_type = other DNA
ccgcagccatgcgctcttgg

SEQ ID NO: 104 - DNA, 14 bp, Synthetic construct
  source 1..14: mol_type = other DNA
tcagtcatgacttc

SEQ ID NO: 105 - DNA, 20 bp, Synthetic construct
  source 1..20: mol_type = other DNA
gctgattagagagaggtccc

SEQ ID NO: 106 - DNA, 20 bp, Synthetic construct
  source 1..20: mol_type = other DNA
tcccatttcaggagacctgg

SEQ ID NO: 107 - DNA, 20 bp, Synthetic construct
  source 1..20: mol_type = other DNA
cggtgcaaggcttaggaatt

SEQ ID NO: 108 - DNA, 20 bp, Synthetic construct
  source 1..20: mol_type = other DNA
gcttcagtcatgacttcctt

SEQ ID NO: 109 - DNA, 21 bp, Synthetic construct
  source 1..21: mol_type = other DNA
agcttcagtcatgacttcctt

SEQ ID NO: 110 - DNA, 21 bp, Synthetic construct
  source 1..21: mol_type = other DNA
gcttcagtcatgacttcctta

SEQ ID NO: 111 - DNA, 21 bp, Synthetic construct
  source 1..21: mol_type = other DNA
agcttcttgtccagctttata

SEQ ID NO: 112 - DNA, 15 bp, Synthetic construct
  source 1..15: mol_type = other DNA
tcagtcatgacttca

SEQ ID NO: 113 - DNA, 21 bp, Synthetic construct
  source 1..21: mol_type = other DNA
tggtaatccactttcagagga

SEQ ID NO: 114 - DNA, 15 bp, Synthetic construct
  source 1..15: mol_type = other DNA
atcagtcatgacttc

SEQ ID NO: 115 - DNA, 20 bp, Synthetic construct
  source 1..20: mol_type = other DNA
tggtaatccactttcagagg

SEQ ID NO: 116 - DNA, 21 bp, Synthetic construct
  source 1..21: mol_type = other DNA
tgcttcagtcatgacttcctt

SEQ ID NO: 117 - DNA, 20 bp, Synthetic construct
  source 1..20: mol_type = other DNA
cactgatttttgcccaggat

SEQ ID NO: 118 - DNA, 21 bp, Synthetic construct
  source 1..21: mol_type = other DNA
cactgatttttgcccaggata

SEQ ID NO: 119 - DNA, 21 bp, Synthetic construct
  source 1..21: mol_type = other DNA
aagcttcttgtccagctttat

SEQ ID NO: 120 - DNA, 20 bp, Synthetic construct
  source 1..20: mol_type = other DNA
acccaattcagaaggaagga

SEQ ID NO: 121 - DNA, 21 bp, Synthetic construct
  source 1..21: mol_type = other DNA
acccaattcagaaggaaggaa

SEQ ID NO: 122 - DNA, 21 bp, Synthetic construct
  source 1..21: mol_type = other DNA
aacccaattcagaaggaagga

SEQ ID NO: 123 - DNA, 21 bp, Synthetic construct
  source 1..21: mol_type = other DNA
tgcttcagtcatgacttcctt

SEQ ID NO: 124 - DNA, 21 bp, Synthetic construct
  source 1..21: mol_type = other DNA
atggtaatccactttcagagg

SEQ ID NO: 125 - DNA, 21 bp, Synthetic construct
  source 1..21: mol_type = other DNA
tcttggttacatgaaatccca

SEQ ID NO: 126 - DNA, 20 bp, Synthetic construct
  source 1..20: mol_type = other DNA
attcactttcataatgctgg

SEQ ID NO: 127 - DNA, 21 bp, Synthetic construct
  source 1..21: mol_type = other DNA
attcactttcataatgctgga

SEQ ID NO: 128 - DNA, 21 bp, Synthetic construct
  source 1..21: mol_type = other DNA
atcttggttacatgaaatccc

SEQ ID NO: 129 - DNA, 20 bp, Synthetic construct
  source 1..20: mol_type = other DNA
cagctttattagggacagca

SEQ ID NO: 130 - DNA, 21 bp, Synthetic construct
  source 1..21: mol_type = other DNA
cagctttattagggacagcaa

SEQ ID NO: 131 - DNA, 21 bp, Synthetic construct
  source 1..21: mol_type = other DNA
acagctttattagggacagca

SEQ ID NO: 132 - DNA, 16 bp, Synthetic construct
  source 1..16: mol_type = other DNA
ttcagtcatgacttcc

SEQ ID NO: 133 - DNA, 20 bp, synthetic construct
  source 1..20: mol_type = other DNA
  misc_feature 1..5: note = RNA
  misc_feature 6..15: note = DNA
  misc_feature 16..20: note = RNA
gcttcagtcatgacttcctt

SEQ ID NO: 134 - DNA, 21 bp, Synthetic construct
  source 1..21: mol_type = other DNA
tgctccgttggtgcttgttca

SEQ ID NO: 135 - DNA, 14 bp, Synthetic construct
  source 1..14: mol_type = other DNA
tgctacaaaaccca

SEQ ID NO: 136 - DNA, 15 bp, Synthetic construct
  source 1..15: mol_type = other DNA
ccattgtcacactcc

SEQ ID NO: 137 - DNA, 20 bp, Synthetic construct
  source 1..20: mol_type = other DNA
cggttagaagactcatcttt

SEQ ID NO: 138 - DNA, 30 bp, Synthetic construct
  source 1..30: mol_type = other DNA
ctccaacatcaaggaagatggcatttctag

SEQ ID NO: 139 - DNA, 23 bp, Synthetic construct
  source 1..23: mol_type = other DNA
gaatattaacanactgacaagtc

SEQ ID NO: 140 - DNA, 21 bp, Synthetic construct
  source 1..21: mol_type = other DNA
cgttgatanttctgccatnct

SEQ ID NO: 141 - DNA, 19 bp, Synthetic construct
  source 1..19: mol_type = other DNA
gccatggttttttctcagg

SEQ ID NO: 142 - DNA, 20 bp, Synthetic construct
  source 1..20: mol_type = other DNA
cctgccctttgttctagttg

SEQ ID NO: 143 - DNA, 21 bp, Synthetic construct
  source 1..21: mol_type = other DNA
gtcgccccttctccccgcagc

SEQ ID NO: 144 - DNA, 18 bp, Synthetic construct
  source 1..18: mol_type = other DNA
ggaccctcctccggagcc

SEQ ID NO: 145 - DNA, 23 bp, Synthetic construct
  source 1..23: mol_type = other DNA
accaggcgtctcgtggggcacat

SEQ ID NO: 146 - DNA, 18 bp, Synthetic construct
  source 1..18: mol_type = other DNA
tctcccagcgtgcgccat

SEQ ID NO: 147 - DNA, 15 bp, Synthetic construct
  source 1..15: mol_type = other DNA
gtgctccattgatgc

SEQ ID NO: 148 - DNA, 20 bp, Synthetic construct
  source 1..20: mol_type = other DNA
tcagggcattctttccattc

SEQ ID NO: 149 - DNA, 20 bp, Synthetic construct
  source 1..20: mol_type = other DNA
cgaaggaaacaatactccga

SEQ ID NO: 150 - DNA, 20 bp, Synthetic construct
  source 1..20: mol_type = other DNA
gacagcagccgcagcagaaa

SEQ ID NO: 151 - DNA, 20 bp, Synthetic construct
  source 1..20: mol_type = other DNA
tggaaaggcttatacccctc

SEQ ID NO: 152 - DNA, 20 bp, Synthetic construct
  source 1..20: mol_type = other DNA
tcaaggaagatggcatttct

SEQ ID NO: 153 - RNA, 16 nt, Synthetic construct
  source 1..16: mol_type = other RNA
gtggctaacagaagct

SEQ ID NO: 154 - RNA, 25 nt, Synthetic construct
  source 1..25: mol_type = other RNA
tttgccgctgcccaatgccatcctg

SEQ ID NO: 155 - DNA, 18 bp, synthetic construct
  source 1..18: mol_type = other DNA
  misc_feature 1..4: note = RNA
  misc_feature 5..14: note = DNA
  misc_feature 15..18: note = RNA
gcgtgcctcctcactggc

SEQ ID NO: 156 - DNA, 20 bp, Synthetic construct
  source 1..20: mol_type = other DNA
ccttggccacgccggcatcc

SEQ ID NO: 157 - DNA, 20 bp, Synthetic construct
  source 1..20: mol_type = other DNA
gtcacacttgctggcctgtc

SEQ ID NO: 158 - DNA, 20 bp, Synthetic construct
  source 1..20: mol_type = other DNA
tggcagtggacacgggtccc

SEQ ID NO: 159 - DNA, 20 bp, Synthetic construct
  source 1..20: mol_type = other DNA
actcaccgagcttcctggtc

SEQ ID NO: 160 - DNA, 3731 bp, Homo sapiens
  source 1..3731: mol_type = genomic DNA
gtccgatggggctctggtggcgtgatctgcgcgccccaggcgtcaagcacccacaccctagaaggtttccgcagcgacgtcgaggcgctcatggttgcaggcgggcgccgccgttcagttcagggtctgagcctggaggagtgagccaggcagtgagactggctcgggcgggccgggacgcgtcgttgcagcagcggctcccagctcccagccaggattccgcgcgccccttcacgcgccctgctcctgaacttcagctcctgcacagtcctccccaccgcaaggctcaaggcgccgccggcgtggaccgcgcacggcctctaggtctcctcgccaggacagcaacctctcccctggccctcatgggcaccgtcagctccaggcggtcctggtggccgctgccactgctgctgctgctgctgctgctcctgggtcccgcgggcgcccgtgcgcaggaggacgaggacggcgactacgaggagctggtgctagccttgcgttccgaggaggacggcctggccgaagcacccgagcacggaaccacagccaccttccaccgctgcgccaaggatccgtggaggttgcctggcacctacgtggtggtgctgaaggaggagacccacctctcgcagtcagagcgcactgcccgccgcctgcaggcccaggctgcccgccggggatacctcaccaagatcctgcatgtcttccatggccttcttcctggcttcctggtgaagatgagtggcgacctgctggagctggccttgaagttgccccatgtcgactacatcgaggaggactcctctgtctttgcccagagcatcccgtggaacctggagcggattacccctccacggtaccgggcggatgaataccagccccccgacggaggcagcctggtggaggtgtatctcctagacaccagcatacagagtgaccaccgggaaatcgagggcagggtcatggtcaccgacttcgagaatgtgcccgaggaggacgggacccgcttccacagacaggccagcaagtgtgacagtcatggcacccacctggcaggggtggtcagcggccgggatgccggcgtggccaagggtgccagcatgcgcagcctgcgcgtgctcaactgccaagggaagggcacggttagcggcaccctcataggcctggagtttattcggaaaagccagctggtccagcctgtggggccactggtggtgctgctgcccctggcgggtgggtacagccgcgtcctcaacgccgcctgccagcgcctggcgagggctggggtcgtgctggtcaccgctgccggcaacttccgggacgatgcctgcctctactccccagcctcagctcccgaggtcatcacagttggggccaccaatgcccaagaccagccggtgaccctggggactttggggaccaactttggccgctgtgtggacctctttgccccaggggaggacatcattggtgcctccagcgactgcagcacctgctttgtgtcacagagtgggacatcacaggctgctgcccacgtggctggcattgcagccatgatgctgtctgccgagccggagctcaccctggccgagttgaggcagagactgatccacttctctgccaaagatgtcatcaatgaggcctggttccctgaggaccagcgggtactgacccccaacctggtggccgccctgccccccagcacccatggggcaggttggcagctgttttgcaggactgtatggtcagcacactcggggcctacacggatggccacagccgtcgcccgctgcgccccagatgaggagctgctgagctgctccagtttctccaggagtgggaagcggcggggcgagcgcatggaggcccaagggggcaagctggtctgccgggcccacaacgcttttgggggtgagggtgtctacgccattgccaggtgctgcctgctaccccaggccaactgcagcgtccacacagctccaccagctgaggccagcatggggacccgtgtccactgccaccaacagggccacgtcctcacaggctgcagctcccactgggaggtggaggaccttggcacccacaagccgcctgtgctgaggccacgaggtcagcccaaccagtgcgtgggccacagggaggccagcatccacgcttcctgctgccatgccccaggtctggaatgcaaagtcaaggagcatggaatcccggcccctcaggagcaggtgaccgtggcctgcgaggagggctggaccctgactggctgcagtgccctccctgggacctcccacgtcctgggggcctacgccgtagacaacacgtgtgtagtcaggagccgggacgtcagcactacaggcagcaccagcgaaggggccgtgacagccgttgccatctgctgccggagccggcacctggcgcaggcctcccaggagctccagtgacagccccatcccaggatgggtgtctggggagggtcaagggctggggctgagctttaaaatggttccgacttgtccctctctcagccctccatggcctggcacgaggggatggggatgcttccgcctttccggggctgctggcctggcccttgagtggggcagcctccttgcctggaactcactcactctgggtgcctcctccccaggtggaggtgccaggaagctccctccctcactgtggggcatttcaccattcaaacaggtcgagctgtgctcgggtgctgccagctgctcccaatgtgccgatgtccgtgggcagaatgacttttattgagctcttgttccgtgccaggcattcaatcctcaggtctccaccaaggaggcaggattcttcccatggataggggagggggcggtaggggctgcagggacaaacatcgttggggggtgagtgtgaaaggtgctgatggccctcatctccagctaactgtggagaagcccctgggggctccctgattaatggaggcttagctttctggatggcatctagccagaggctggagacaggtgcgcccctggtggtcacaggctgtgccttggtttcctgagccacctttactctgctctatgccaggctgtgctagcaacacccaaaggtggcctgcggggagccatcacctaggactgactcggcagtgtgcagtggtgcatgcactgtctcagccaacccgctccactacccggcagggtacacattcgcacccctacttcacagaggaagaaacctggaaccagagggggcgtgcctgccaagctcacacagcaggaactgagccagaaacgcagattgggctggctctgaagccaagcctcttcttacttcacccggctgggctcctcatttttacgggtaacagtgaggctgggaaggggaacacagaccaggaagctcggtgagtgatggcagaacgatgcctgcaggcatggaactttttccgttatcacccaggcctgattcactggcctggcggagatgcttctaaggcatggtcgggggagagggccaacaactgtccctccttgagcaccagccccacccaagcaagcagacatttatcttttgggtctgtcctctctgttgcctttttacagccaacttttctagacctgttttgcttttgtaacttgaagatatttattctgggttttgtagcatttttattaatatggtgactttttaaaataaaaacaaacaaacgttgtcctaacaaaaaaaaaaaaaaaaaaaaa

SEQ ID NO: 161 - DNA, 20 bp, synthetic construct
  source 1..20: mol_type = other DNA
ctggagcagctgcctctagg

SEQ ID NO: 162 - DNA, 20 bp, synthetic construct
  source 1..20: mol_type = other DNA
ccctgcatgaagctgagaag

SEQ ID NO: 163 - DNA, 20 bp, synthetic construct
  source 1..20: mol_type = other DNA
gtgcttcatgtaaccctgca

SEQ ID NO: 164 - DNA, 20 bp, synthetic construct
  source 1..20: mol_type = other DNA
tggcctgctgggccacctgg

SEQ ID NO: 165 - DNA, 20 bp, synthetic construct
  source 1..20: mol_type = other DNA
tgctccagtagtctttcagg

SEQ ID NO: 166 - DNA, 20 bp, synthetic construct
  source 1..20: mol_type = other DNA
tgacctcagggtccaaatcc

SEQ ID NO: 167 - DNA, 20 bp, synthetic construct
  source 1..20: mol_type = other DNA
ctctagggatgaactgagca

SEQ ID NO: 168 - DNA, 20 bp, synthetic construct
  source 1..20: mol_type = other DNA
cagctgcctctagggatgaa

SEQ ID NO: 169 - DNA, 20 bp, synthetic construct
  source 1..20: mol_type = other DNA
ttcctggagcagctgcctct

SEQ ID NO: 170 - DNA, 20 bp, synthetic construct
  source 1..20: mol_type = other DNA
acctctgttcctggagcagc

SEQ ID NO: 171 - DNA, 20 bp, synthetic construct
  source 1..20: mol_type = other DNA
atggcacctctgttcctgga

SEQ ID NO: 172 - DNA, 20 bp, synthetic construct
  source 1..20: mol_type = other DNA
gggctgcatggcacctctgt

SEQ ID NO: 173 - DNA, 20 bp, synthetic construct
  source 1..20: mol_type = other DNA
ggcaacaacaaggagtaccc

SEQ ID NO: 174 - DNA, 20 bp, synthetic construct
  source 1..20: mol_type = other DNA
ggagggcaacaacaaggagt

SEQ ID NO: 175 - DNA, 20 bp, synthetic construct
  source 1..20: mol_type = other DNA
agctcgggcagaggccagga

SEQ ID NO: 176 - DNA, 20 bp, synthetic construct
  source 1..20: mol_type = other DNA
tctgaagctcgggcagaggc

SEQ ID NO: 177 - DNA, 20 bp, synthetic construct
  source 1..20: mol_type = other DNA
cggcctctgaagctcgggca

SEQ ID NO: 178 - DNA, 20 bp, synthetic construct
  source 1..20: mol_type = other DNA
catcctcggcctctgaagct

SEQ ID NO: 179 - DNA, 20 bp, synthetic construct
  source 1..20: mol_type = other DNA
gggaggcatcctcggcctct

SEQ ID NO: 180 - DNA, 20 bp, synthetic construct
  source 1..20: mol_type = other DNA
gagaagggaggcatcctcgg

SEQ ID NO: 181 - DNA, 20 bp, synthetic construct
  source 1..20: mol_type = other DNA
gctgagaagggaggcatcct

SEQ ID NO: 182 - DNA, 20 bp, synthetic construct
  source 1..20: mol_type = other DNA
tgcatgaagctgagaaggga

SEQ ID NO: 183 - DNA, 20 bp, synthetic construct
  source 1..20: mol_type = other DNA
gcgtgcttcatgtaaccctg

SEQ ID NO: 184 - DNA, 20 bp, synthetic construct
  source 1..20: mol_type = other DNA
ttggtggcgtgcttcatgta

SEQ ID NO: 185 - DNA, 20 bp, synthetic construct
  source 1..20: mol_type = other DNA
gcatccttggcggtcttggt

SEQ ID NO: 186 - DNA, 20 bp, synthetic construct
  source 1..20: mol_type = other DNA
ctcagtgcatccttggcggt

SEQ ID NO: 187 - DNA, 20 bp, synthetic construct
  source 1..20: mol_type = other DNA
tgctcagtgcatccttggcg

SEQ ID NO: 188 - DNA, 20 bp, synthetic construct
  source 1..20: mol_type = other DNA
ctcctgcacgctgctcagtg

SEQ ID NO: 189 - DNA, 20 bp, synthetic construct
  source 1..20: mol_type = other DNA
gactcctgcacgctgctcag

SEQ ID NO: 190 - DNA, 20 bp, synthetic construct
  source 1..20: mol_type = other DNA
gccacctgggactcctgcac

SEQ ID NO: 191 - DNA, 20 bp, synthetic construct
  source 1..20: mol_type = other DNA
gcccctggcctgctgggcca

SEQ ID NO: 192 - DNA, 20 bp, synthetic construct
  source 1..20: mol_type = other DNA
agcccctggcctgctgggcc

SEQ ID NO: 193 - DNA, 20 bp, synthetic construct
  source 1..20: mol_type = other DNA
gaagccatcggtcacccagc

SEQ ID NO: 194 - DNA, 20 bp, synthetic construct
  source 1..20: mol_type = other DNA
ctgaagccatcggtcaccca

SEQ ID NO: 195 - DNA, 20 bp, synthetic construct
  source 1..20: mol_type = other DNA
tttcagggaactgaagccat

SEQ ID NO: 196 - DNA, 20 bp, synthetic construct
  source 1..20: mol_type = other DNA
cagtagtctttcagggaact

SEQ ID NO: 197 - DNA, 20 bp, synthetic construct
  source 1..20: mol_type = other DNA
aacggtgctccagtagtctt

SEQ ID NO: 198 - DNA, 20 bp, synthetic construct
  source 1..20: mol_type = other DNA
ccttaacggtgctccagtag

SEQ ID NO: 199 - DNA, 20 bp, synthetic construct
  source 1..20: mol_type = other DNA
gaacttgtccttaacggtgc

SEQ ID NO: 200 - DNA, 20 bp, synthetic construct
  source 1..20: mol_type = other DNA
ctcagagaacttgtccttaa

SEQ ID NO: 201 - DNA, 20 bp, synthetic construct
  source 1..20: mol_type = other DNA
agaactcagagaacttgtcc

SEQ ID NO: 202 - DNA, 20 bp, synthetic construct
  source 1..20: mol_type = other DNA
atcccagaactcagagaact

SEQ ID NO: 203 - DNA, 20 bp, synthetic construct
  source 1..20: mol_type = other DNA
cagggtccaaatcccagaac

SEQ ID NO: 204 - DNA, 20 bp, synthetic construct
  source 1..20: mol_type = other DNA
ttggtctgacctcagggtcc

SEQ ID NO: 205 - DNA, 20 bp, synthetic construct
  source 1..20: mol_type = other DNA
gttggtctgacctcagggtc

SEQ ID NO: 206 - DNA, 20 bp, synthetic construct
  source 1..20: mol_type = other DNA
gctgaagttggtctgacctc

SEQ ID NO: 207 - DNA, 20 bp, synthetic construct
  source 1..20: mol_type = other DNA
cagccacggctgaagttggt

SEQ ID NO: 208 - DNA, 20 bp, synthetic construct
  source 1..20: mol_type = other DNA
caggcagccacggctgaagt

SEQ ID NO: 209 - DNA, 20 bp, synthetic construct
  source 1..20: mol_type = other DNA
attgaggtctcaggcagcca

SEQ ID NO: 210 - DNA, 20 bp, synthetic construct
  source 1..20: mol_type = other DNA
tggataggcaggtggacttg

SEQ ID NO: 211 - DNA, 20 bp, synthetic construct
  source 1..20: mol_type = other DNA
ctcgcaggatggataggcag

SEQ ID NO: 212 - DNA, 20 bp, synthetic construct
  source 1..20: mol_type = other DNA
aggagctcgcaggatggata

SEQ ID NO: 213 - DNA, 20 bp, synthetic construct
  source 1..20: mol_type = other DNA
gacccaaggagctcgcagga

SEQ ID NO: 214 - DNA, 20 bp, synthetic construct
  source 1..20: mol_type = other DNA
tgcaggacccaaggagctcg

SEQ ID NO: 215 - DNA, 20 bp, synthetic construct
  source 1..20: mol_type = other DNA
tggagattgcaggacccaag

SEQ ID NO: 216 - DNA, 20 bp, synthetic construct
  source 1..20: mol_type = other DNA
agccctggagattgcaggac

SEQ ID NO: 217 - DNA, 20 bp, synthetic construct
  source 1..20: mol_type = other DNA
ggcagccctggagattgcag

SEQ ID NO: 218 - DNA, 20 bp, synthetic construct
  source 1..20: mol_type = other DNA
ccttttaagcaacctacagg

SEQ ID NO: 219 - DNA, 20 bp, synthetic construct
  source 1..20: mol_type = other DNA
ctgtcccttttaagcaacct

SEQ ID NO: 220 - DNA, 20 bp, synthetic construct
  source 1..20: mol_type = other DNA
agaatactgtcccttttaag

SEQ ID NO: 221 - DNA, 20 bp, synthetic construct
  source 1..20: mol_type = other DNA
cactgagaatactgtccctt

SEQ ID NO: 222 - DNA, 20 bp, synthetic construct
  source 1..20: mol_type = other DNA
taggagagcactgagaatac

SEQ ID NO: 223 - DNA, 20 bp, synthetic construct
  source 1..20: mol_type = other DNA
gggtaggagagcactgagaa

SEQ ID NO: 224 - DNA, 20 bp, synthetic construct
  source 1..20: mol_type = other DNA
aggccagcatgcctggaggg

SEQ ID NO: 225 - DNA, 20 bp, synthetic construct
  source 1..20: mol_type = other DNA
ttgggaggccagcatgcctg

SEQ ID NO: 226 - DNA, 20 bp, synthetic construct
  source 1..20: mol_type = other DNA
agctttattgggaggccagc

SEQ ID NO: 227 - DNA, 20 bp, synthetic construct
  source 1..20: mol_type = other DNA
tgtccagctttattgggagg

SEQ ID NO: 228 - DNA, 20 bp, synthetic construct
  source 1..20: mol_type = other DNA
cttgtccagctttattggga

SEQ ID NO: 229 - DNA, 20 bp, synthetic construct
  source 1..20: mol_type = other DNA
agcttcttgtccagctttat

SEQ ID NO: 230 - DNA, 20 bp, synthetic construct
  source 1..20: mol_type = other DNA
catagcagcttcttgtccag

SEQ ID NO: 231 - DNA, 20 bp, synthetic construct
  source 1..20: mol_type = other DNA
acctggagcagctgcctcta

SEQ ID NO: 232 - DNA, 20 bp, synthetic construct
  source 1..20: mol_type = other DNA
agggcattacctggagcagc

SEQ ID NO: 233 - DNA, 20 bp, synthetic construct
  source 1..20: mol_type = other DNA
acctctgttcctgcaaggaa

SEQ ID NO: 234 - DNA, 20 bp, synthetic construct
  source 1..20: mol_type = other DNA
aagtgcttacgggcagaggc

SEQ ID NO: 235 - DNA, 20 bp, synthetic construct
  source 1..20: mol_type = other DNA
gcgggtgtacctggcctgct

SEQ ID NO: 236 - DNA, 20 bp, synthetic construct
  source 1..20: mol_type = other DNA
aaccctgttgtgaactgcac

SEQ ID NO: 237 - DNA, 20 bp, synthetic construct
  source 1..20: mol_type = other DNA
agtgagcaataccgcctgag

SEQ ID NO: 238 - DNA, 20 bp, synthetic construct
  source 1..20: mol_type = other DNA
cgggcttgaattaggtcagg

SEQ ID NO: 239 - DNA, 20 bp, synthetic construct
  source 1..20: mol_type = other DNA
gctgcatggcacctctgttc

SEQ ID NO: 240 - DNA, 20 bp, synthetic construct
  source 1..20: mol_type = other DNA
ggcagaggccaggagcgcca

SEQ ID NO: 241 - DNA, 20 bp, synthetic construct
  source 1..20: mol_type = other DNA
ctgaagctcgggcagaggcc

SEQ ID NO: 242 - DNA, 20 bp, synthetic construct
  source 1..20: mol_type = other DNA
tcctcggcctctgaagctcg

SEQ ID NO: 243 - DNA, 20 bp, synthetic construct
  source 1..20: mol_type = other DNA
tcttggtggcgtgcttcatg

SEQ ID NO: 244 - DNA, 20 bp, synthetic construct
  source 1..20: mol_type = other DNA
gctcagtgcatccttggcgg

SEQ ID NO: 245 - DNA, 20 bp, synthetic construct
  source 1..20: mol_type = other DNA
cctgcacgctgctcagtgca

SEQ ID NO: 246 - DNA, 20 bp, synthetic construct
  source 1..20: mol_type = other DNA
actgaagccatcggtcaccc

SEQ ID NO: 247 - DNA, 20 bp, synthetic construct
  source 1..20: mol_type = other DNA
cagaactcagagaacttgtc

SEQ ID NO: 248 - DNA, 20 bp, synthetic construct
  source 1..20: mol_type = other DNA
gaagttggtctgacctcagg

SEQ ID NO: 249 - DNA, 20 bp, synthetic construct
  source 1..20: mol_type = other DNA
ccctggagattgcaggaccc

SEQ ID NO: 250 - DNA, 20 bp, synthetic construct
  source 1..20: mol_type = other DNA
gggcagccctggagattgca

SEQ ID NO: 251 - DNA, 20 bp, synthetic construct
  source 1..20: mol_type = other DNA
cccttttaagcaacctacag